United States Patent Application Publication US 2004/0123340 A1 - sequence listing, part 4

SEQ ID NO: 14389 - DNA, 523 bp, Gossypium hirsutum
  Clone ID: LIB3829-033-Q1-K6-D6
ctctagggttcaatccccctgacaaagatataatgatgaagcctccaagacgaagtgacgactcactaatcactgcttggatcttgttccgctacctggtgattgggctctatgtggggatagccactgtcggggtcttcatcatatggtacacccaccatagcttcctgggcattgatctgagtggagatgggcatagtcttgttacctactcccgacttgctaactgggctaaatgcgattcttgggaaggtttttctgtgtcaccattcacagcaggttcccaagtgttcaaattcgattccgacccatgcgactactttcagtcagggaaaatcaaagcctcgactctttccctctctgtcttggtagccattgaaatgttcaactcccttaatgccctatctgaagatggaagcttgttaacgatgcctccttgggtgaacccatggctccttttagccatgtcagtctcatttggactgcacttcttgattctgtatgtgccattccttgctcgagt

SEQ ID NO: 14390 - DNA, 524 bp, Gossypium hirsutum
  Clone ID: LIB3829-033-Q1-K6-D7
ggaaaaatggaaaaagaaccgactgaagatgcgatctttgatttgatcctgggagtgtggagaaatctaggccgttagcctttccaattttttattaattatcagacagtgaatacagaaagagaaatgaaaggaggcgatgaggaggtcgcagctccggctggcccgccacagccgttggattggaaattttctcaggtatttggtgagcgaaccgctggagaagaaattcaagaagttgatattatttccgcaattgaattcgataaaactggggatcatcttgcaactggtgaccgtgggggccgtgtggttctttttgagaggacagatgcaaaggatcatggtctatcaagaagggatctagaaagaacggattatccaattagtcggcaccctgagttccgttacaagacagagttccagagccatgagcctgagtttgactacctcaaaagcttggaaatagaggaaaaaatcaacaaaatcagatggtgccaaacagccaacagtgcactgtttct

SEQ ID NO: 14391 - DNA, 527 bp, Gossypium hirsutum
  Clone ID: LIB3829-033-Q1-K6-D8
cttattgatcatgggacctggtgcttgtcaaggtgtttatgattactcaaccaattgaaccaacccatgttggctctaattccccatttttattctctccatctgatatgattgaatcaaattataattggtggttgcatcagagcatttttgtgtcaatttcctggtttgactaaatttattgtccttgataaagatggggaatgtggccaaagcttatgatttgaagtttgtggtgaatattagcgagcttggtgaggacgatccactcatgcagaacgtgaccaggctctctcccttattgaatgtcccctggtataccactggaggttctaaacatgatggatttggttgctttctccatcaggtcaaactaccccgtgggagaatgttagatattctcagtttgaatactgcttcattgcaggacacagtggttgtgggatcaccgagtggcaagaggggcaatttgtcaaattggctgacaaggacattaaaagcaaccacaagtgactggcgcatggtag

SEQ ID NO: 14392 - DNA, 523 bp, Gossypium hirsutum
  Clone ID: LIB3829-033-Q1-K6-D9
cttgcatcgtgttcttatgatgcccaggtgataatctggaaggaaaataatcaaaacgagtggctgcaggcccatgtttttaatgatcataagtcatctgtgaactccattgcatgggcaccccatgagcttggcctctgtttggcctgcgggtcttctgatggggatatatcagtctttaccgctagggatgatggtagttgggataccaccaggatagagcaagctcaccctgttggagtaacctcagtctcgtgggcaccatcaaccgcactcggtgctttcattggatctggtctactggatcctgttcagaagctggcctctggtggatgtgacaatatggtcaaagtatggaggctgtataatgggagttggaagatggactacagccctgccctccagatgcacactgattgggtgcgggatgttgcttgggcacccaacttggggctcccaaaatccaccattgcaagtgcttctcaggatgggaaagttattatatggacttgcggtaaagaag

SEQ ID NO: 14393 - DNA, 520 bp, Gossypium hirsutum
  Clone ID: LIB3829-033-Q1-K6-E1
agaaagaagagtttgatcagtacatcaaaattcaggaagagcatctgacaaagggaataagagacatgaagcagagacacatggcttcttttcttgctgctattgagaaaggcatcagcaagaagcttagggagaaagatatggaactagagactatgaataacaagaatagagaactggttgagagaataaagcaggtgactgcagaagcacataattggcattatagagcaaaatacaacgagtcagttgttaatgtgttgaagagcaaccttcagcaagtaatctcacaaggtgctcaacacgggaaagaaggttttggagatagtgaagttgatgatgcgacctcctatattgatccgaacaactttctcagtattcatcttggggctgcaaaatgtgtttccaagggcatgaaggaacacattatttgcagagcatgcaacgcaaaggaggtgtccattttgttgatgccgtgtaggcacctctgcttatgtaaagactgtgatttatcaatcaa

SEQ ID NO: 14394 - DNA, 517 bp, Gossypium hirsutum
  Clone ID: LIB3829-033-Q1-K6-E10
ctactaataagccgaagttggttatctcacaaactggtcttgaagcacctaacactcacactacgtggaaacaagaagctgccacccaagaaccttgtcaagccaagttggtaaccgatagtaatgtggatgagggtggtttagaaaccacccaaaccataaaaccctccgaggagaatgcagcttctgtttctaataggccaaaatctgttaaattgcgagcaggacaggagccacctaatacttatagcacccaaaaacaagattctgctgcactagaatcttctcaaggtaagtcggtaactgagagtagcgtgaatgatagtagttcccaaagtgtgaacccccatgaatgtggcaatccgggcagtaaagttaacgatacatgcaataagccaacttcttctggaaacattagctcagataaactggaagatgagaccaaggatggttcacaatttcaacaaaagacaatgtctgtaatgcggggtggggaaatggtacaggtgagttacca

SEQ ID NO: 14395 - DNA, 527 bp, Gossypium hirsutum
  Clone ID: LIB3829-033-Q1-K6-E11
atcccaacaacgtcactactgatcatattcaactgtatctggatgagaacaagtcattgatcttaaagattgttgagagccagaattccgggaaatttagtgaatgtgctgagaatcaagcacggctgcagcgaaacctcatgtacttggctgcaattgcagattctcaaccacaacctccagccgtacatgcccaggctggagggcactacatgcagcaacagcaacaaactcaacagatgacaccacaatcgcttatggctgcacggtcctccatgttgtatggtcagcaaccattttctgctcaccaacaacaacaagctctgcatggtccacttggcatgagctccggtggaagcacaggtcttcacatgctgcaaagtgaagctagcactacaggtggcaacggagcacttggagctggagttttccctggtttcaggcatggctcttctggagaaggcaagcaagacattggaagtgcagggtcagccgaagctcgtggagttctcggctgcgattgacgg

SEQ ID NO: 14396 - DNA, 525 bp, Gossypium hirsutum
  Clone ID: LIB3829-033-Q1-K6-E2
gaacaaccaccgttcaggcccctcggaagccctgctggtgatggtgcttcagttattctaaaatccgttctcgaaagagccactcaagtcttaactcatccatccggaaatttcccaatgcctcattacgcattctggagagcatcgtttgatgaattcttcactctcctcaccaaatactgcgtcaccaaatacgagtcgataatacaatcgatgcacaaccagtctctaccaaccacagaagtaattggttcagaagctataagacgtgaaatgccttgcgagctcttacgtgctagtctccctcacaccaatgaagttcaaagaaagcttttaatggacttctcacaacgttctgtcccggataacggatccaactcgcctgccggaagtaatagccaaataaactccgaatcagtaatgggctaacctaaaagaaaaaaaggttttagaggtcttttacactttgggttcttgtttaaatgacacccctttttttaaatttttttatcattttcttaaaaa

SEQ ID NO: 14397 - DNA, 526 bp, Gossypium hirsutum
  Clone ID: LIB3829-033-Q1-K6-E3
cgacggagaccagatctaatgtaacggtgccggatgggggagaagttgcggcattcgagtcgctccaatttaccgacgaaatccaccgtttgatttcggctccgggaactgataatgctagttccttcacggctctacttgaactaccggctacacaagtcgttgagcttcttcactctcccgagtcggtgaagctcatagttgcttcggctccgaacgttgaagatttcaaaggcagcttccattttccttctaatactggtttgattcaaaaagatgcaaggttctctgtgttttctggagaaggtaacaacaagaatgagaagagcaactcgcctgaaatgacgtcgaaaaattcaagcgcgaatcttgagaaggcggtaaagagtgagccggcagaaaccgtgtcatccctgccgttggtgtctgatccaacgatggagaaccggaatatcaagcggaaagatcgagaaaagaaggttaaagggtcaacaaagaaaagcaaaactgcaacaaatgagagatt

SEQ ID NO: 14398 - DNA, 461 bp, Gossypium hirsutum
  Clone ID: LIB3829-033-Q1-K6-E4
agaaaaccccggaaggttcctctttctacacttggaaatcttcatgctctgcttctgctaaggggatctgtaagatcttcctggcaatttccgtaggaaagtaatcattccaaatagagatctcagagcctctgcctactctccaaccaagcccgtcttgaaggagaccccttgctgcccagatgctcttccaagtaaaagaaggggcagatcttaatcaaacaaaggggccgactcacaagaaaacaaaaccaacaagaaacacaaagcaaaacaaacacaaaatggcggaaaccctaacctcttgctagagatggcagacaatatcttgctaggatagcagacctaattccatttcgcttttgctaactataaatttatttatttattcttaatttatatgtcaaaactcaaaagaaaataaatatattttacaattatatcaaatattaattacatct

SEQ ID NO: 14399 - DNA, 529 bp, Gossypium hirsutum
  Clone ID: LIB3829-033-Q1-K6-E5
cagagagcctctgaaatcccagatctctctttggaacccatatttctaaggaaaatggtgcacaaatcgttgatctatgcatttgtatctcgtggggaagttatcttagcagaatatactgaattcagtggtaatttcaattccatagcttttcaatgcctccaaaagcttccttcttccaacaacaagttcacttacaactgtgatggccacaccttcaattaccttgttgacaatggctacacatattgtgttgttgcagatgaatcagctggaagccaagtaccgattgcttttttggagcgtgtcaaggaggactttgtgtcaaaatatggtagtggaaaggctgctactgctcctgccaacagcctgaacaaggaatttgggccaaaactaaaagaacatatgcagtactgtgttgagcatcctgaagaaataagcaagcttgctaagatcaaatctcaggtttctgaagtcaaaggtgttatgatggagaacatagagaaggtgttggatagaggggaaaaga

SEQ ID NO: 14400 - DNA, 529 bp, Gossypium hirsutum
  Clone ID: LIB3829-033-Q1-K6-E6
aaaaatacagaacaacatttcatagatatgtttccatctatttccagattactatagcaagagagtaagtcaagtatgagttattgtgcttagtagaaataatagaatgcaatgaggctacaaaagcaagaaccagaaattacaagcaaatatagtaatcaggaggaacaacaagcagtaagtaattaagccaagtggcctatcaacctgcaaccactggtatagggtttagacaaagcaaatcaagcaacatagagatagattggttcagtgcagaatagcatcaacaaagaccaccaaatgtgaagatatcccaaatttaatccatatcctaaactaggtcaacaaaacatagaaccataaaaaaggcacagatgaactaaatatgaactataaagcattagggaggaaccgaaatcaataaattaatgaacatccactagcagtaacaataagacaaacagttatttctctgctataaacaagaatcatagagaagaaaagcaaaaaaaaaagaacagaacagagc

SEQ ID NO: 14401 - DNA, 506 bp, Gossypium hirsutum
  Clone ID: LIB3829-033-Q1-K6-E7
cgacagttgggtttctttgttctttgtttctttttatttcatcaaaacatgtctgcgattcctccatcaacttcacaaaactcatcatcttcaggtttccaggatttcttgcccgtgatggctgacaagctcggaggggatggcttgataggggaactgtgcaatgggttcaaactgttgatggatagagaaaaaggggtcattactttcgacagcttgaagaagaattcggccctgttggggttacaggacttgacagatgatgatttgaagtgtatgatgaaagaaggtgattttgatggcgatggggctcttaatcagatggagttttgtgtgttgatgttcaggttgagccctgagttgatggaagcatctcggtttttttttgaagaagcttttcaacatgaattcaaggattttcattgattgttcttgtttcatccataattgtcgtttttatgaaattgttgaatatacagaaagaatagaacaaaagagaattgatc

SEQ ID NO: 14402 - DNA, 529 bp, Gossypium hirsutum
  Clone ID: LIB3829-033-Q1-K6-E8
cccacgcgtccgaaaatataagaaaaaaaatcatacgcaatgagcactgctggtcaggttattcgttgcaaagctgcggtggcatgggaggcggggaagccactatcgatagaagaagtggaagtggcaccaccccaaaagcatgaagtccgtattaagattctcttcactgctttatgtcacactgatgtatactactgggagtgtaagggttacactcctctgtttcctcgtatacttggtcatgaagcctcagggatcgtggagagtgtgggtgagggtgtgaatgatttgaaacctggagatcatgtgctccctatcttcaccggagaatgcaaagaatgtcgccactgtctgtcagaagaaagcaataacatgtgcgaactgcttaggatcaactgcgaccgaggtgttatgcttgctgatgggaaaaccagattttccatcaacggcaagcctatctaccactttgttggaacctcgacctttagccaatatactgtcgtccatgttggccaggttgccaaga

SEQ ID NO: 14403 - DNA, 525 bp, Gossypium hirsutum
  Clone ID: LIB3829-033-Q1-K6-E9
cttgttgatgctttagctcatggcagttctcagcctgttcatcttgaaatagatattagtaactatgttggagagaatggaaatggaaattactctgctcagtataagaatttagataagttggtgagtaatttggataaagaagttatatccaagttatatggttcggtttcgacttcgggttcatcaagcaatccatctagcttagaaacagggtcaaggcgcaatgtgaacggtgatggtgttagaataaatgaaccgacaggccctcagcctcatccgtcaggggtagttattcctcccgttaatccggtaggtggtagatatttgtttcctgggcctggtgctggaatgtatcctaccaggggtgatttcggtggcggcgacatgcttctaggaccaaatgatcctcgttggttcggtggacttggtggagatcacggtttccctggcgcacaaccgtgagggtgttcctcctggtgctcgttttgatccatatggtccacctggtgttcctggttttga

SEQ ID NO: 14404 - DNA, 397 bp, Gossypium hirsutum
  Clone ID: LIB3829-033-Q1-K6-F1
cgcatacatgaaaatgccttctttcatcttcaaaaaaaccaaaccttcctgttgttaaaatccgtaaaaacaagccggtttgcttcttaaatgtgaaatagatagctattgtacattgttgatccgttgcatcgacaatggagccgtatttgagaatctgtattggcccttagtgaaaacaccgtccatactatgagtaggggaagtggggttagtgtgcatcaacatacctaatatggggtttcaaactaaatttaagctggtagattaacattgttcttatatatatatatataaagagagagagagagaataggaattgtgaacttttttgaactttgaatttgtgtaaccctatgtttcatcttaatgtttttggatttgtaaggttgattgt

SEQ ID NO: 14405 - DNA, 531 bp, Gossypium hirsutum
  Clone ID: LIB3829-033-Q1-K6-F10
ggtctgtagtttttggtattgttatcgaggagctatcattgaaacctctcacttttcgtaaatttgaaggctccccaatttaatttttttattttttattttggaaatttgtttggtggaacaaagtttcggtttttagaaccattttttcgaagctataaataacgctattcgatcccaggtttttgtgtgtgttaagtaagagatcaatctcgcaaattttgaatcaggtttttgagtttaagtggcgagatctgagcaatggcagcaaattcatcaaatggggaacaacaaacaccctcaaagccaccacctttgccatctccattgcgtttttccaagtttttccagtccaacatgaggattttggttactggaggagctggttttatcggctcccacttagttgacaaattgatggaaaacgagaaaaatgaggtgattgttgttgataactacttcactggatccaaggacaatcttagaaaatggatcggtcatcctagatttgagcttattcgtcatgatgtt

SEQ ID NO: 14406 - DNA, 526 bp, Gossypium hirsutum
  Clone ID: LIB3829-033-Q1-K6-F11
gtgagcaatatgttttgcccaagtttttcaaaggggcacaccttcaagttttggatgctgccgagtacgaagaatcaccggatgtaccgttcaaccttataaccgaaggagagctggttacgacagcttcctttgctgatgatggagagattttagacggaatgattacccgaagccggggtgagattagacacatgtgcagcccgaaggtaacaagctcgtccggaacaactccgtccaaagaatttaagagcattcaaagcccacggttctcggaaaaggtatatagccccaggataagccaactgagaggtgagctaagtcctggaaatgctggaagagggccatttagtcctagagccaatgaaaagccatcaaatttaggcaaaggttagcaagtaatggaccaagttgctaaaagaatatatatacatatatgagcatgcagttcaagaagtctgctatgcatatcccatactaatcccctgattttcgctatcactcatgtaaaatatattctactact

SEQ ID NO: 14407 - DNA, 527 bp, Gossypium hirsutum
  Clone ID: LIB3829-033-Q1-K6-F12
gttatttcagagctaaaatacgaaatagaaagggaatgggtcacaacaagccccggcgtttcaaaacccataactctcatcggggacagtctagcagaaaccatcaattccaaagggaagatgaatctctcccacatgatcaacctcccgaagaggaacccaatgttcctaaagttcaacttgctatgtgggattttggacagtgtgatgcaaaaaggtgcactgggcgcaaacttgcaagatttgggttgttgaaagatttgcgtgtaaatagtggttttggcggcattgttttaagtcctgttggtagtcaatgtgtctcaaaagaagattacaacttaataaagaggaaagggttagctgttgtggattgctcatgggctcgtcttagtgatgtaccctttgtgaagctgcggtgtggtgctcctcgcttgttgccatggctagtggctgcaaacccagtaaattatggtcgaccatgtgagctatcatgcgtagaagcattatctgctgctttactaatatgt

SEQ ID NO: 14408 - DNA, 371 bp, Gossypium hirsutum
  Clone ID: LIB3829-033-Q1-K6-F2
ggcctacaataagagacaggctgagggtcccaaagacgaagatgttgagtctgacaaatcagtgtctgaggtgaatgatgaggatgatgatgaagaaggcagcggagacgaggaagatgatgagtaggaaggtccgtggtggatagcataatcaatgtaggctgtgatagtgtttgatcaaaaccttatgttaatgctttagatgtttccatgttattcttttagatgcgcatgccatctaagggagaaatgtacctctgaatcctgttggttccttttgaccttcagaaattaatagttgtagatgggataatctgcttctatatgtacttttgatttaaagttgaatggcttagataaatcctttttgt

SEQ ID NO: 14409 - DNA, 526 bp, Gossypium hirsutum
  Clone ID: LIB3829-033-Q1-K6-F3
ccacactctatccttttgctccttttgggtatcatggcaacttcctccacttccctagtgctcaaggttcaccgacatgaacctgaactaatagctccagctaagcctacccctcatgaatacaaactattatccgacatcgatgatcaagaaggtcttcggttccaaattccggttatccaattttacaaatacaatccttccatgcaaggaaaagaccctgttagggtgatcagggaggcacttgcacaagcgttagtgttttattacccatttgccggtaggctaagggaaggacctcagcgcaagctgatggtggattgcacgggtgaaggtctaatgtttatcgaagcggatgcggatgttacgctcgagcaattcggtgatgtacttcaaccaccattcccatgcttggaggagctcctttatgatgttccgggttctactggggtgttgaattgccccgtaatacttattcaggtaacgcggcttagatgcggtggttttatcttcgcccttcgcctga

SEQ ID NO: 14410 - DNA, 530 bp, Gossypium hirsutum
  Clone ID: LIB3829-033-Q1-K6-F4
ggaagtctctgcgtgttcttggaagtgttggcgagcccattaatccaagtgcttggaggtggttctttaatgtagttggagggtctaggtgccctatttctgacacttggtggcaaactgaaacaggtggctttatgattactcctctaccgggtgcctggccgcagaaacctggttctgccacctttcctttctttggagttcagcctgtcatagtggatgagaaaggaactgagattgatggtgagtgtagcggttatttgtgtgtgaaaggctcatggcctggtgcatttcgaactctttacggtgaccatgagagatatgagacaacatactttagaccattccctggatattattttacgggtgatggctgcagtagggacaaggatgggtaccactggcttactggaagagttgatgatgttatcaatgttagtggacatcgtattggcacagctgaggtggaatctgctctagtttctcatcctcaatgtgcagaagctgctgtggttggtgttgagcatgag

SEQ ID NO: 14411 - DNA, 525 bp, Gossypium hirsutum
  Clone ID: LIB3829-033-Q1-K6-F5
tgctttcttcccgtatcgatgggtgcttatgcaatttggtgcttttatcattctttgcggggcaacacactttataaacttgtggacattcactatgcattctaaagttgttgctatggtgatgaccattgccaaggttgcatgtgctattgtatcatgtgcgactgcattgatgcttgtacatattattcctgatcttttgagtgttaaaactcgggaactatttctgaggaacaaagccgaggagcttgacagggaaatgggacttattctcactcaagaagaaactggaaggcatgtaaggatgctaactcatgaaatcagaagcacgcttgacaggcatacgatattgaagactacccttgttgaattgggtaggaccttgggtctggaggaatgtgccctttggatgccatcaaggaccggtatggatttgcaactttctcatactctcaattaccaaatacaagttggatctactgtgccaataaatcttcccatggtcaatgaagtcttcaatagtgc

SEQ ID NO: 14412 - DNA, 525 bp, Gossypium hirsutum
  Clone ID: LIB3829-033-Q1-K6-F6
ctttgtttaagaataaggatcttttaagatacgccggatccgctaaaatacgccgatccccgtccgtcttccgatcatatggggctgcttgaccagttgtgggatgataccgttgctggtccccgacccgataatggccttggcaagctccgaaagcactccactttcactttccggcctaactctgccaaggaatctgatggcgggagtgtaagatcgtacggtgatgaagcgccggaggaagcgacgagagtgacacgtagtattatgatcgtaaagccgcctggttaccagagcggatcgcctccggtttcgccggccggatcgacccctccggtatctcctttttccggaggcagagaatcatatcggtttcggagaaggtccacatcggatgcatacgagaaggctaacgaggttggaccaaggagcccttgtcctcctccttacgacgtgtgagatatgagtcctctcccatatttggcgacaaatcaaatgggttttggtactgtttgcatgcttagg

SEQ ID NO: 14413 - DNA, 533 bp, Gossypium hirsutum
  Clone ID: LIB3829-033-Q1-K6-F7
ccctggaacagttacagtttcgacccgtccatctttttctcttcttcccagcagaaataataatagcaataatcatggagtccaaacatgggagttggagactctcattaatgttgcttctggttatgcttgggttggcaaaagctgatatcaatcaagacaaaacagaatgtagtaatgagctagtagggctggctccatgtctcccctacgttggtggagacgcaaaaacccccaccatagattgttgcagtgggctgaaacaggtgctggataagagccggaaatgcctgtgtgtattgcttaaagatagagatgaccccagccttggcctcaacatcaacgctactctcgcggcaacacttcctatcacttgtcgtgcccctgtcaacatgaccgactgcatctctcttctgcacttaactcccgattcccaggaagctaagttatttcaaggatatcagaagctgacacacactggcaactccaactccactaccactgctgctgctgctgcagacaagagtgatgga

SEQ ID NO: 14414 - DNA, 525 bp, Gossypium hirsutum
  Clone ID: LIB3829-033-Q1-K6-F8
aaagttggatggatgctccaagatttagcaccaatcacctagctggaatagaaagatttctatcatttgcaattgaaaaatcagtttttaacggaaaaatatattgtccatgctatctttgcaataataggatattgcacgaatcacatattgttggtgagcatcttcgtcttcatggtataataaaagaatacaagcattggatttttcatggagaatgcattgaaagaacatcggtgcaaaccgaccaaacagtgagaacttctccatcaatttgtacgcaatcacaagacaacgaagccgatttaagagatctcataacggatgctctaggtatcaacatcccaactcttaatgagagttttgatggagtttcagaataatggttaggaggatgattttaatgaggcccaaaggactacagagagagcaactactcttttagatgattgtgatattccgctctatcctggttgtgtcaagttttcatgcgtctcatccttacttcggctttaccactttaaa

SEQ ID NO: 14415 - DNA, 528 bp, Gossypium hirsutum
  Clone ID: LIB3829-033-Q1-K6-F9
gagaagcctcatcgccgctgccgcagccaccatgggtcgtatgcacagtcgcggtaagggtatttcagcctcagctctgccttacaagaggaccccgccaagctggctcaagatctcgtctcaagatgttgaggaaaacatttgcaagtttgcaaagaagggcttgaccccatctcagattggtgtcattctccgtgattctcatggtattgctcaagttaggagcgttactggcagcaagatcttgcgtatcctcaaggctcacggtctggcccctgaaattccggaggatttgtatcaccttatcaagaaggcggttgccatccgaaagcatttggagagaaacaggaaggataaggattccaagttcaggttgatccttgttgagagccggattcacaggcttgctcgctactacaagaaaacaaagaagcttccccctgtctggaaatacgaatctacaacagccagcactctcgttgcttaagctaggcattgtggggtggtgcaattttgggggaatccggg

SEQ ID NO: 14416 - DNA, 385 bp, Gossypium hirsutum
  Clone ID: LIB3829-033-Q1-K6-G1
gcgagcggccgcccgcgatctagggaaggcacagccgcaaaccctggtccaaatttattaatgcagataatcagcatcttgtttctcccgaggctattgattttcttgataagttgcttcggtacgaccatcaggacaggctaactgctagagaggctatggcccatccttactttgcacaagtcagggcagcagagagcagcaggatgcggactcagtaactcaattcccttgggaggatttcatttgtaaatcagaaccagactcatctggggtaagagatttaatgtgttgtttaatgttctcaaaaatattgtgactgcggttctcaatcttaggcagttaaaaaggctgtggacgaaacataaacttctctttacttttc

SEQ ID NO: 14417 - DNA, 534 bp, Gossypium hirsutum
  Clone ID: LIB3829-033-Q1-K6-G10
cctgatcccatgactgttgcagcaccacccaaatcaacttacaggcatgaattttatcagaaaccagaggaagtggttgtcacaatatttgccaagggaataccacgcgagtgtgttaaagttaattatggtgaacaaatactaagtgttgctgtcaatgcacccggcaaagatgcttatcatctccaacctcgcttatttggaaagataatacctgacaagtgcagatatgatgttttgtcaaccaaaattgaaattaggttagcaaaagctgaaccaattcaatggacatccctcgaatttagcatggaagttgctgtgccccaaaggattaatgtatcttctgttgctgcaaatcaaagaccatcgtacccatcctccaaaccaaaaagggttgattgggataaaatcgaagctcaagtgaaaaaggaggagaaagatgaaaagctagatggtgatgcagctttgaataaatttttccgcgacatttatcaggatgctgacgaggatgcaagaagggccatgcagaaatcc

SEQ ID NO: 14418 - DNA, 525 bp, Gossypium hirsutum
  Clone ID: LIB3829-033-Q1-K6-G11
ctttgtttttatacagtagaagcaccatttgttcaaacaaagcaagagagagtgttttttggttagaagaaaaagagaggaaagacaatgtcaggtcctcagtgctgttcgaacccgccaatattggaccctgcaagtggagctggtcatgttgagaaacttgctggcttcaacacttatgtttctggttctattcaatccaaccttactattcttcttgtctctgatatttacggatatgaggctccaaacttgagaaagctcgcagacaaggttgcagctgctgggttctatgtggtggctcctgacttcttttatggagaaccctttgtccgtgataaacctgatagaccttttcctgcttggataaaggatcatggaccggataaaggttttgaggatgcaaagctcataattgatgctttgaaaagtaaaggggtttcatcaattggagctgctgggttctgctggggtgctaaagttgtggttgaactggcaaaggttgcccttatccaagcagctgtg

SEQ ID NO: 14419 - DNA, 51 bp, Gossypium hirsutum
  Clone ID: LIB3829-033-Q1-K6-G12
gggaaaaaaaacatgttcttaaaaaagctggggaagggattaaggtttatt

SEQ ID NO: 14420 - DNA, 528 bp, Gossypium hirsutum
  Clone ID: LIB3829-033-Q1-K6-G3
cttgccaaacagaatgagtgtcaggaaaagctgaagtttgaagggaagagaaagcatatcgacagtgtgactgactgtaactggtcttctggtggaggtgacatcgactctttgaagagtaaagataaacattgtagcaaaagaaaagcaaaatatgattgtgagcctccccctggaaggactattttgtctgcatctgcaaatgatgatagaagacgattgcagaaagtgaagtccaggggtccagagaaacttcttatctctagtggaagccaagaaaaagagggtagtgaagtaaaagtcaaaatgggggaaaaccagagaagcaacaatgacaatggtggacaagaagtgggtcgtagtggcaaaaataagatgtcaaaagagagtaagaaatcttctgtgcaggagcaaagttcaattgtttctactccccaacctgatggcaacaatgaagagagagaatcaaataaaggtggtagagatcctaaggaggttgccacttctcagaatttatttctgaaacgg

SEQ ID NO: 14421 - DNA, 532 bp, Gossypium hirsutum
  Clone ID: LIB3829-033-Q1-K6-G4
atcaacttcaatatctaaagtgtgttataaaagaaaccttaagactgcaccctattttacctttattgcttccaagagaatgtggcaagaattgtgagattaatggatttgagataccttccaagaccagagtgattatcaatgcctgggcaattgggagagatccaaatcattgggctcagcctgaaaaatttgagcctgaaaggtttatcaacagttcagtagatttcttgggaacaaattttgagttcattccatttggcgctggaagaaggatatgtccaggcatgctatttgcagtgccaaatctagagctaccacttgcccaactgttgttccattttgattggaagttgccgaagcaagaagatatagatatgaccgaggagtttgccttgtccgtgaggaggaaaactgatctagtcttagttcctactccttaccatgcttctattatcgtttcctacaagcacaaggaggatatatttgtctaggcatatcatagattaaattctgctcttagtccttctac

SEQ ID NO: 14422 - DNA, 524 bp, Gossypium hirsutum
  Clone ID: LIB3829-033-Q1-K6-G5
agtgtatggagccagttgagaagtgtttgagggatgctaagatggataagagcagtgtccatgatgttgttcttgttggtggttccactcgtattcctaaagtgcagcagttgttgcaagacttcttcaacgggaaggagctctgcaagagcattaatcctgatgaggccgttgcttatggtgctgcggttcaggctgctatcttgagtggtgaaggaaatgagaaggttcaggatctattgcttttggatgtcactcctttgtcccttggactcgaaactgctggcggtgttatgactgttttgattccgagaaacactaccattcccaccaagaaggagcaggtgttttcaacttactctgataaccaacccggtgtcttgatccaagtttatgagggtgagagagctcgaacccgggacaacaatttgttgggtaaattcgagctctctggcattccaccagcacccagaggcgttccccaaattacagtttgcttcgacattgatgctaatggtatcttg

SEQ ID NO: 14423 - DNA, 531 bp, Gossypium hirsutum
  Clone ID: LIB3829-033-Q1-K6-G7
cttcactcaaagaagccaaacactttggattctctcatttttctagaagtttttgagtattgaaagaagtatggcaaacaatgacggagaagcaacaagcgggaagagcactggattctctcgcgtcgcccttaatgaaagaatcctttcttcgatgactcgaagatcgattgctgctcatccttggcatgatttggagattggacctggtgctccagcagtttttaactgtgtggttgaaattggaaaaggtaccaaggtcaagtacgagctcgacaaaaccagtggtcttataaaagttgatcgtgttctgtactcatcagttgtttacccacacaactatggtttcatcccaaggactatttgtgaggacagtgatcctatggatgtcctgatactgatgcaggagcctgttttgcctggttcttttcttcgtgctcgtgctattgggttaatgcctatgattgatcagggtgagaaggatgacaagattattgctgtatgtgctgatgatcccgagttccgtcatta

SEQ ID NO: 14424 - DNA, 525 bp, Gossypium hirsutum
  Clone ID: LIB3829-033-Q1-K6-G8
aaaagccttataagcatgatgaggagctcccaaccgcacttcacagggaccaaatgaatgggattatcatttgatatattggaactgatggggctttttaactcacagccagtctaaaaaagtgctacatgtttcattcactcattcattaattaatttgtaaatagacagttttaactcttcttgaatcataaagcccctgtacctgatattggaaggaatgggttcttttttgttgaggaggaggaatacttttttccatgttatagtttactccggctactttgctccttggtgcttacctgaactgttgaagcaatggcatagataataccaggaaccagtccttgaatcatttcagtcctaatctcttggaaaatttgatcccatgccctgaatcatcatcctgttcgaataattgatgccaatcatttcccaatagaaaatcctttttcaaatgattctgcagttatggtataagtgtttgaccttagttgcatatattcttggctatgtataaattag

SEQ ID NO: 14425 - DNA, 525 bp, Gossypium hirsutum
  Clone ID: LIB3829-033-Q1-K6-G9
gtattaacattaagcatggctgagcacccgaatcttgttaaattgataggtttttgtgcagagggtgatcaaagattacttgtttacgagtacatgccgttagggtcattggagaatcatttatacgaacttccggctagccgaaagccacttgattggaacacgagaatgaaaatagctgctggtgcagcaaggggtttagagtatttgcatgaaaaaatgaagccccctgttatataccgggacttgaaatgctcaaatatattgctcggtgaggggtatcatccgaagctatccgattttggtttggctaaagttggtcccattggcgataagactcatgtttctactagggttatgggtacatacggttactgtgcaccggattatgcaatgaccggacagctgacatttaagtcggatatttacagctttggggttgtcctcttggaactaattaccggtaggaaagcgattgacgagacaagagatcgctcagagcaaaatctcgttgcatgggcacgt

SEQ ID NO: 14426 - DNA, 533 bp, Gossypium hirsutum
  Clone ID: LIB3829-033-Q1-K6-H1
atcaggagtaactgaagaagatgcagatattcgtcaaaaccctaacagggaagactatcactctcgaggttgaaagcagcgataccatcgacaatgtcaaggccaagattcaggataaagaaggcatccctcctgatcagcagaggttgatttttgctggtaagcaactggaagatggccgaaccctcgctgattataacatccaaaaggagtccactcttcacctagttttaaggcttaggggaggaaccatgatcaaggtgaagactctcaccgggaaagaaattgaaattgacattgaaccaactgataccattgatcgtatcaaggaacgggtcgaagagaaagaaggaattcctccagttcagcaaaggcttatatacgccgggaagcaacttgcagatgacaagacagcgcgggactacaatattgagggtggctctgtgctgcatcttgtgcttgcactgcggggtggccgtctctagatggtgcaatataaaaaaaaagaaaaaaagaagaagaaaatcctggac

SEQ ID NO: 14427 - DNA, 530 bp, Gossypium hirsutum
  Clone ID: LIB3829-033-Q1-K6-H10
gaaaataatggggaatacgtcttgcgtgttttgtacctgcgtcaaacaggggaatatcggcgtggtggagcggtttggtcggttcgagaaattggcggagcctggcctccacatatttaatcctttcgccggtcagtatctcgccggcatcctttcaaccagaatctcctccctcgatgttcgcatcgaaaccaaaaccaaggacaatgtgtttgtgcaattgctttgctcgattcagtacagagtggtgaaggcacatgctgatgatgcattttacgagctgcaaaatcccgatgaacagatccgggcctatgtgtttgatgttgttcgagctctagttcctagaatgaatttggatgatctctttgaacaaaagggtgaggttgctaaagctgttcttgaggaacttggaaaggtgataggagaatatggatacagcattgagcacatactgatggttgacattatacctgatcctgctgtgcgcacggcaatgaatgagataaatgcagctcaaagacttcagcttg

SEQ ID NO: 14428 - DNA, 519 bp, Gossypium hirsutum
  Clone ID: LIB3829-033-Q1-K6-H11
gaaaaatatcgaaagccctaactttgccggtcgagcctaaaggcggaagccgcagttttctccttcgcgacactcacaacttaccagctttcttttgaatcccaaaaagaaacaatgtctcgtgtgtacgtgggtaaccttgacccacgagtttcggagcgggaccttgaagacgagtttcgtgtctttggagttattcggagtgtatgggttgctcgaaggccacctggttatgctttcattgattttgatgatcgcagagacgccgaagatgcaattcgtgaattagatggcaagaatggctggagagttgagctttctcataattctagaggaagaggcggacgtggaggtggtcagggacgctctggtggttctgatttgaagtgttatgagtgtggtgagcctggtcattttgctcgagaatgtcgcatgcgtggtggttcaggaagacgccgcagccgcagccctagatatcgtagtagcccaagctatggacgaagaagttatagtcctcgt

SEQ ID NO: 14429 - DNA, 394 bp, Gossypium hirsutum
  Clone ID: LIB3829-033-Q1-K6-H12
cagtgttccaattggtataggaaagagctcacatatcaagagagccattattgacaagaatgctcgaattggagacaatgtgaagatcataaacagtgaaaacgtgcaagaagcggcaagggaaaccgatggatatttcataaagagtgggattgtgacagtaatcaaggatgccttgattcctagtggaactgtaatctgagaagattgcattatgatacagcaaaccaccattagtgtttctagatagagaaagtaatgcaatagcaaatcatttccacttttttcccttatcatgtatattttgagctactgtagtataatatattaataaatttgaactactgtagtataattatattaataaaatgaaataaagccggtaatggctggt

SEQ ID NO: 14430 - DNA, 517 bp, Gossypium hirsutum
  Clone ID: LIB3829-033-Q1-K6-H2
ctaattcggtaagacattttcaggaaaattagaagccaacaccgattttctgcttcctcttcctcttcccccatccttgacacctgatcttctgcttgccgtcagccaacactgattctcaacaccagacaccggcgttcatcaaagcttttacccatcttcgcctttcgttgtcaaaatctgcactggcattcatcttcttctctcgaagattcgatcacagtgcttattgttactttaaaatttatttactgaaagcatttgtggattgcaacggatgggtgcactttgtgaatataagatattgtgtctagttaaaagctgatctttgtgcatttgaatcaagtgcttaccatactcttcattccatgaagcttatggtaatgattgagctaaaagtcgctcgagccactttaaatccccaggctgtttaccttatggtggcaactcatttaattcctatgatggtcataatcgaaacatgggagcttatagaactgagggatgggatactgag

SEQ ID NO: 14431 - DNA, 530 bp, Gossypium hirsutum
  Clone ID: LIB3829-033-Q1-K6-H3
atcaaaacctccatcattggatgcccacttattaccagttgatttgccagagataatatcattgacaggcagtcagggaatcgagaagatagcctgggatgcttctggagagcgattagcagtgtcgtataaaggaggggatgatatttataaaggtctcattgcaatatatgatacgaggaggaatcccttgatttctgcatcactaattggttttatacgaggtcctggcgacaatccaaagccaattgcattttcctttcatgacaagtttaagcaaggaccattgctttcggtgtgctggagcagtggattttgctgtacttaccctctactatttcgatcctaaatttcttacgcggtcaaggtattttcaggtctgccatgtttattgactgcatgataaattttaggcatgatacataaacaaacccttgaatttcacccagatgaaaatcaaatctcttttatttgcgttatgaacccttaattctattgtaattatacccattaaatttaagagtaagtga

SEQ ID NO: 14432 - DNA, 533 bp, Gossypium hirsutum
  Clone ID: LIB3829-033-Q1-K6-H4
gttctatgaaggtgataatcaatataggatgagtgggcaagcattggagttcaagcagctcaatattcatgcatgggaagcatttgataaaggtcaagatattcacatgcaggctgctccatcccaagctgaactcctctacaagaattacaaggtcattaaagagaagttgaaatcaaagacgaaagataccataatggaaaagtacggcaatgcagcgactgaagaagagatacccgtggagcttctcttggggcaaagtgagaggcaggtcgaatatgatcgtgctggaaggattattaagggaatggaaacttctcttccaaaaagtaagtatgaagaagatgttttcattaataatcacaccagtgtctggggctcctggtggaaggatcaccaatgggggtacaagtgttgcaagcagaccattcgcaatagttactgtactggtgctgccggtattgaagctgcagaagcagccacagacttgatgaagtcaaacattgctcgtaaagcgtcctccgaagatgccc

SEQ ID NO: 14433 - DNA, 520 bp, Gossypium hirsutum
  Clone ID: LIB3829-033-Q1-K6-H5
atgaatctaagcttgatgtcctaggggggaggagcaacgatgttgagatagtgccttcaagtggacttcgaaaaagaaagcacagtagatccaatagtgcgggaagcactccattggttcattctaatgaaggatcaccacctcatcctgtagggaatgagggtactcaagcttctgagcatgatcgacaggttgttgatcattaccatccacaggggccttctgtacaggatgggggatggcttgctcgagttgctgccttgcttgtgggggaagatccaacacaatcatatgcacttatatgtggcaattgccacaggcacaacggacttgctaggaaggaggatttcccatatataacttattactgcccgcactgccaagccttgaataagccaaaacaactggaagagcatggttctagatctagccccatcatggaccccttgcaatcgggagttggcgatgcagcaaaaagtccaagtggtagcatggctgaggatatactcaggagctccag

SEQ ID NO: 14434 - DNA, 531 bp, Gossypium hirsutum
  Clone ID: LIB3829-033-Q1-K6-H6
ctcaattctttcatcccttgttttccttcaacccaaacaaaacctaatctttttgaaaaaatggcaccaaaagctgaaaaaaagccagccgagaagaagccagccgaggagaagaaagccgtagctgagaaagccccggcagagaagaagcctaaggctggtaaaaagcttcccaaggaaggcggagcggctgccggagacaagaagaagaagagagttaagaagagcgtcgagacctacaagatctacatcttcaaggtcctgaagcaagttcaccctgacatcgggatctctagcaaagctatggggatcatgaacagtttcatcaacgatatcttcgagaagcttgctcaggaagcctctaggctcgcgaggtacaacaagaaacccaccatcacttccagggaaatccagaccgctgttaggcttgtacttcccggtgagcttgccaagcacgccgtttctgaaggtaccaaggccgtgaccaagtttacttcatcttgaaaggctattagttgatctgtagttggg

SEQ ID NO: 14435 - DNA, 532 bp, Gossypium hirsutum
  Clone ID: LIB3829-033-Q1-K6-H7
gagaggtgatgttaacagcatcagcatcgggtctggaacaaatatccaagataactcccttgttcatgtcgcaaaatctaacttgagtgggaaggttttaccaactattatcggaagtaatgttacagtgggtcatagtgctgttttacatggatgtactgttgaggatgaagcgttcgttggtatgggggctaccctattagatggagtttatgttgagaagcatgccatggttgctgccggagctcttgtgaggcagaacactaggatcccatgtggagaggtttggggaggtaacccggccaagttcctaaggaagctaacggaagaagagatggccttcatttcccagtcagccataaattattccaatttagctcaagttcatgctgcagaaaatggaaagagcttcgatgaaattgaatttgagaagatgctgcggaagaaatttgctcgtcgggatgaggaatacgattcaatgctcggtgttgttcgcgagacacctcccgagcttatccttcccgataatgtt

SEQ ID NO: 14436 - DNA, 521 bp, Gossypium hirsutum
  Clone ID: LIB3829-033-Q1-K6-H8
cgccaatcacacttctttttccttttcatttcactgcactgaattcactcaccatcgctactccttttctctcgatctgttagggtttcttttaattttaggctttcaagggaacatacagtttccttttaattttaatggtgatttctatggcgacggaaaccctagatggcaagaaaccggaggaagaggaggtgaaagagaagactgaaacttcccattgaataagaaatcagtagaaggaaaaagaaatcagatccttctgaataagaagaagaaaaatcagtactttctttccattgaagaacaagaagtgaaagaggatatcaagggaaaatgtcaagagaaaaactaagaagagccgcacttcctcctgttcaataggtgttcttttttatttctattgctttcagtatattttttttgagattattttcagtgaaagaaaaaaatttggaaataacccatcatttttttgtgtggaaaactagaaaaaaaacaaattaaatgacaagcctata

SEQ ID NO: 14437 - DNA, 528 bp, Gossypium hirsutum
  Clone ID: LIB3829-033-Q1-K6-H9
cggacgcgtgggcaacttcatccaggacctctctttgccaactaccacttctcactgcctgtcctttctatagcagaagcattcttcaatggctggaaagagcaaggttttagtcattggaggcactgggtacatcggaaagttcattgttgaagccagtgtgaaagagggtcatcccacttttgctttagtaagagagggttcagtttcagacccagttaagggaaaggttattaacaatttcaagaacttaggggttcatctgttgtatggggatctttacgatcatgagagtctggttaaggcaataaagcaagctgatgtggtgatatccgcggtaggttcgatgcagttagcagatcaagttaagatcattgctgccattaaagaagctgggaatgtgaagaggtttttcccatcggaattcggaaatgatgtggaccgggtccatgctgttgagccagctaaaacagcatttgcaaccaaggctcaaatccggcgtgctattgaggctgagggaatccccta

SEQ ID NO: 14438 - DNA, 357 bp, Gossypium hirsutum
  Clone ID: LIB3829-033-Q1-N6-A1
aaaaaaaccccatagaaacccatcattttaaaaggggaagaggggggctggggggtaaacccaaggaaaaagccgcaaggggtaaaagcaaagggcattcagggggggaaagaaagaaaacgaagccaaaaattccatcccgccccactaaaatatacaggaggggcgtcagggttaaagggaaaacagggaacaaaagggcaaaacaggaacataattcaaatttcaaggccccattttaaaactttgggggaaacaaagtaaagccggaacttccctcgttaacgggttccaagggtaagggcaaacagttccgagcttttaaaaacgcgcagcctttccaatggggacacaaac

SEQ ID NO: 14439 - DNA, 529 bp, Gossypium hirsutum
  Clone ID: LIB3829-033-Q1-N6-A2
ggagactatagaagactcctatcatattcagatccataaacacgagtcttacatctaaactctaaaagcaccaaccagaagaagaggaggaacaaacactctgaccaaagtaaatttgagattctaaagaaaaggtgtcaaaagcagtcattttttagtgaggtgaagaaaacttaaaaaactctcaacaagaaagaacaaaagactggatctataagaaaattgattctccaccattctttcccagtttgacagctaagggtgttgcatattcgatgcaagaacagtcaccaagttgatgcccgagccccaagcgctcaactgtttaattcagaatgcagcaggcatcttcattgttgagtgtggccaggccaaagtgagttcatttgtgaattcatttgcatattattattatgcatggatggaggagccgaattactatagaatccagaccctccattaagagggctaccaccgttttcatcagaagactcgcttgacccaccttgcgacggagaactacctgctg

SEQ ID NO: 14440 - DNA, 503 bp, Gossypium hirsutum
  Clone ID: LIB3829-033-Q1-N6-A3
atccaagggccaacacagttttcattcaggctccagttccagaaaggcagaaaaatcacaattaaacccccctttctttttcatattgctatatgtaaagccactaaaagaattccaattgttcacacactttttacaaaaaggggaatatcaattcattccacacatcaggcacacccggtaagcaccaatgtatgcaatcagagtagcttgcagggttagccaattgctgggggcttagtgtctcccaaaattttctatagatagacgggtggccatcttttcgatattctgagagctgagtaatgttgatgacagataccttcgaacccaaaccagaaagcactttatccaccatgcgcatagtaggcaagtccgaaccacttccccagtagccctccaaagtgataggcctcatttggttatagcaatttccttcacttccaggttcccactcttgactccaaaaagtgttggtgacgttgtaacaaaaaagaacgttt

SEQ ID NO: 14441 - DNA, 185 bp, Gossypium hirsutum
  Clone ID: LIB3829-033-Q1-N6-A4
aaaaaaaaatcttttctttaccattcatccctagccttggatgccttcaaatttcctaagcattttgtgatacacgattttcatcctcaatgtggatgcgagcattgaattcatatttatgtccgacacataggtgtaaatatcggatccatatgaaagttagaacaacaaagttttcatttaac

SEQ ID NO: 14442 - DNA, 540 bp, Gossypium hirsutum
  Clone ID: LIB3829-033-Q1-N6-A5
tcgccaggttttgtgcttagcaaattccccgtctttccatataaaaacatctcagctttctcttgctcttgtccctctctctctctctctctctctcatataagctccgcctggcctaggcgccattctcatcatggctcattttcagcttttttcattaaaaatcttgcagattttttctcttcttctcatcctcctttaccctgcaacagtctcttgcgattgtacttgtgataaggaggacatccaacaaaataaagccgaagcactcagatataaactaggtgccattgctgccattcttgttgccggggctattggagttagcctcccattgttggggacacgaattcctgcgttaaggcccgaaaatgacatattcttcatgatcaaggcttttgctgccggtgttatccttgcaacggggttcgttcacatcctcccggatgcttttgaaagcctaacttcaccatgccttaaagaaagtagtcccatgggggaaattccctttctctggtttcattgccatgatgtcagcga

SEQ ID NO: 14443 - DNA, 516 bp, Gossypium hirsutum
  Clone ID: LIB3829-033-Q1-N6-A6
gataaatagtcaaaggcttttgacattcacatatatataaatatatatagtagcaaacttccatcttatgctttcagtagttacagtgacattgaatcgtctaggtacggtttttgcacttctccatagccctcggagctaggccgatagcctctgtactcttcatgatcctcaatctcttacacgagtcggtaaacatctcccaaggaacatcgcccaccagcatccagtcaccgtctttatcttcataggtgagtacatactcggaaccgtgcaggagatcgattaaccggctctcagacaatccatcaccgccagaaactccatgagaaccacactgaccaattgtaaagcaactgaacatcttttccagtgccgaggagagttctttgtagctgccatagattttgagatcaactttcctcaggtatggagcaccatccatactaactttgacatacagacatcctgatcctaacttggcctctgccttaccatcaccatcatcattcttcg

SEQ ID NO: 14444 - DNA, 481 bp, Gossypium hirsutum
  unsure (1)..(481): unsure at all n locations; Clone ID: LIB3829-033-Q1-N6-B1
ggtaacaaatccccgtttctctgggttgcaaaacagggggtcaaaacaaaggcgccgnccccgccttcttttcgaaggttaaaaccagaaaaaacaacggcaaaaccccaggggcccaaacacaaaacgaaacaacaccccccacaaaaaagaaaaaaaccccccaacgcccaaccccacaaaaaacaggcaccgaaagaccaaaaaccaaggccgcgccaaaccaaaaaaaaaggcgggcccaccgccccgggaaagagggggcgccccccgcgggggaaagataacaaaaagcccggggaacaaaaacccaccggggggggggcaaatccaaaacccaaaaagggggaacccctatccaaaaaaaaggaaaaaacccccccacaaggccccaaaaaaaaattttccagggagcccacggaaacggaatcccaggccgccgaaaacctcgaacccgggggccgggacccacaaccccccg

SEQ ID NO: 14445 - DNA, 534 bp, Gossypium hirsutum
  Clone ID: LIB3829-033-Q1-N6-B2
acaaatgatactgagaattgattagcgatatcaaaggttcaacaattaaaaaaaagttcactcaaagagtgttttttattcatagagatttatggaagagttcagcttcgtcaatcaaccaaagaaaaacatggtaagtctaagcgcaagtccgaagctgacaatttcaataggataacaaggaaaatggtgaataaacttttaggcacccaacatggaccctgtgttcttcctgcactcagtcaacatatccatgtagaactgacacttgctgagttcgcttccatagctgttcaggcaatcctggaatgccttgtagtggatgctgcatgaatcagtgccagctaaactattggaagtagttgctggtgcaggggcagctgcagcctcggaaaccacggtttcatgttgaatagtacgaggacccatcacagcatccacagccctgtgagctacagcacttccagtaccaaaagccatgccctgagctatggtagagcctatgcctccgagcaaggatccaccacttccact

SEQ ID NO: 14446 - DNA, 513 bp, Gossypium hirsutum
  Clone ID: LIB3829-033-Q1-N6-B3
gatcttcaaatgaaatttcatttatgatctaactattacaaaaataattagtctccgtaatttggaggatgagatcaaaaccatcctctcctaaaaccaacagttttttccaaaacagagcgacttgataaaaatgttctcaacgcaaaaaaaaatatccttccaccagcttgacaaaccattccagcaatcctatgtttacttgtcccccatgacaacaggttttccaacattctataccttggcaagctccacagcagcaggcacaggagcaacaccaccagtagttggcagccccacaaacactttgaaagcatcatagataccccactgagctccagttagagttccaatcatcacaatacggaggggaagaccacgggtaaacagaccccataatccaagcttcttcacagcatccccaacagttgctcctttggcattgttaaggaaggagacaaggttgtcagcaggatgcgaaacaatagcacagaagacaccagcaacataacc

SEQ ID NO: 14447 - DNA, 516 bp, Gossypium hirsutum
  Clone ID: LIB3829-033-Q1-N6-B5
cagcaagatgatgaaaaatgtataaaactactttaaaatcttcccctctccatgaatcaaacaagtaatagcgagccgagaaagggaacaaagaaaataaacaagccccatttctccaagacatacagttctaagcctttgagattttgatcctacaaaaaaatggctaactgctggtgaaacgatgtcttctcatatgtcataatctatatcggttatgttctgggccgtggagcgtttcacaagttgtccttcttcattatatctatcaaggttttcacatggagctgggaagatagtaccgattacgcggccttgaatgaaggcacactggaatatgtgtttcttcttgtacgttaaccccacggacatatccctaaacgtcacgtttctgataggaatatcttcactaccatgtatacgaacgggaacacggactccttgaccatgtatccccgtgaagcttatgtctttaactattgggagtgcttttgggtcgaaatcatcatcagggtg

SEQ ID NO: 14448 - DNA, 527 bp, Gossypium hirsutum
  Clone ID: LIB3829-033-Q1-N6-B6
aaaaatcgaaaacacacagccttttcttatcagcctaccaaaagatagagttgggtatctcatctcaggctccttagaaaaagtgcttgtaactgcttatacataacaactaacttctggccgcatatatataaaatcataaaatgactcaccctgctaatcttttatgcggcactcgtagtctccgctttgtcagtttccattggttctacggatgctggaggtgcctcaccacttcctgccggcacattttcactggggtcaccattgcggttagggcttgctttcgggctgtttgcaccctgtggttgagcctcacttccaggatgtggtggggttgccggtgcttcaggcgtggctggtttagccggtttaggtttcatcattattggcctgcaaaacctgtcaagtgcttcagccttcttcctcacatcagctgacaagagaacaggtgtggcatacttgggaagttgatcctgctgctgttttttctctctgagccaggcctcagcttcaacacactcatt

SEQ ID NO: 14449 - DNA, 493 bp, Gossypium hirsutum
  Clone ID: LIB3829-033-Q1-N6-C1
caaaccaaagcagaaaatagaaagggtataataaattagagttgtacgtacattcacaatccaccaacaatcacaaccagttccaaattcatttcatctcccaagtcttctttccacaatgataagggtgccaaatacaactaaggttgcaaagtactataaaacaccaaaccaagtacataaattgatgctcacacatctgctccaaaacacagctatgccaatgacatgctaaggaagcaacaggtaccggcgtttacctgtaagaatctggacgctttggcttgctttgaaaaacggtctcaatcttctccatgacagcaggagtcagtaatgggattacatcaagtgccttcatgttctcttgaatctgagattcctttgtagcaccagtaataaccgatgatatgttgggatttgcagcgcaccatgcgattgcaagttgagctaacggtacaccaagttcatcagcaattggcttcagtccattaac

SEQ ID NO: 14450 - DNA, 518 bp, Gossypium hirsutum
  Clone ID: LIB3829-033-Q1-N6-C2
aaatgaaaaagagtcattgtgcataaaaagtcaatttcttgagaggcaaattgaaatgtttaaaaacaatatagaaaaagttcatacagaagatggtacacaaaagttcactctgtttttttcggtgatcaatcagcagaatccatagtatatatatggagaatgaatgggtcgttctctcattgaacagatccttttcagcttggtgcttttccggtaacgtgctgggcgatccacccaagaccatcgtacagtccatctccggtaagtgcggagcaggcttggatgtgccaatcgtgattttttatgctgtgaagcgaaagggcatcggtgatctcagctggggtcattgcatcctttaggtcttgtttatttgcaaagacgagtataacagaatgttgtaggtcctcgtgtgcgagcaacctgaagagctcctctttcataatggtgattctcgccctatccacactgtctatcaccacgataacagcatgagttccacgatagtatgttgccca

SEQ ID NO: 14451 - DNA, 540 bp, Gossypium hirsutum
  Clone ID: LIB3829-033-Q1-N6-C3
gtgttcaataatattatataaaaaataaatttatccctaccaactttcctacaaaaattgtggcctagaatgaaaaaccaatatattaaaggtcccttacaacacaaattctccaagtaaaaaacaaagccttaattaatgtcgaaaaaggacatgattttttgtttactaaagccaaagttctgcagaagaatctaaggattaatgctctagttgtttcaagcacctttctggaatggaccatcgggtgtgaaaccctgaccacgaccgcctccacgtccccttcctcgacctcgtccacgaccacgaccctgggcaggcaatggtcctgatggaccattaccattgtaatatcccgagtcccgttgcatatttccaccaccataccctcttccatgccctcggaaaccacgtcccctaccacgaccacgacctcgacctcttcctccatagcctcgcccaccatcccatcctccattcctgtgctccaccatgccaccattgatattgcctccttcattgtcctcgaactcagctgac

SEQ ID NO: 14452 - DNA, 506 bp, Gossypium hirsutum
  Clone ID: LIB3829-033-Q1-N6-C4
agccgaactactcgtcaaatctattgcagtccatatagtcttgaacaaagcttagaagagtcgaagttcacacaatagaataagcaaaaacacacgataaaaggaaacaaatcattgggtagcaaaatgcaagccctccactcaaacattacttatttagtactcatcttcaccttcctcatcaccctcgcctgactcagcaccgacttcttcataatccttctcaagtgcagcaaggtcctcacgagcttccgagaattctccttcttccataccctcacccacgtaccagtgaacaaaggcacgcttggcatacatgagatcaaacttgtggtcaatgcgggagaacacctcagcaacgctggttgagttggaaatcatgcaaacggctctctggaccttagcaagatcaccaccaggaacgacagtcggtggctggtagttgataccacacttgaatccagttgggcaccagtcaacgaattgaatagttctcttggtcttgc

SEQ ID NO: 14453 - DNA, 521 bp, Gossypium hirsutum
  Clone ID: LIB3829-033-Q1-N6-C5
gtgaaaccttatccttatgatacgaccttacactcttttttaactttccaatattatacaagacatacaattgacctttagcaattggtcaaacttctgtatattattcatgtaattaacatattagattataaagatatatactttgagaattatggacttcctgatttgtccttgattacctgcaggtttgttgtttatttgatggatgaactttattagtgatgtgcaccggaaataccagcctgtggtggccggcacactcctaggtcggttcatggacagactcttttctctcttctctttagtacttactggtcaggctttagcagctttgcaataaactcatctatgttcctatctgagctcccacctacactaacagctcttttagcaagctctttccatttcgatgcgttactcttaatctctccgcttctttctccgatcatgacttcccttaaacaattcccaagttcctccctcgtgacgatcccttggtcttgtttagctctcacacc

SEQ ID NO: 14454 - DNA, 540 bp, Gossypium hirsutum
  Clone ID: LIB3829-033-Q1-N6-C6
agatgaacaagcttttattagactcgaagttgaagctgacattatgatgtacaaaggacgaaacaggaataaaagctagttttaacataaagctacctaaacagaaagttactaccatttctcataaccaaacagttctttttcttcttttcatttcccactctacaagtactttcatatggagactgatccatatgctatgcatttgcagctcctataattccatggatccatagatttagaaggagaaagcaaaggactactctgtggcagcaacaacagctggcccttccaccttgaatttagcaccccatatctcctcttcttcagcaggcactgcagtgatcttgttcttaggattctcatagcttcttaatcctcctactgctgtggagtagaaacagccttgagggaaagaagcaagagatttgccacaggcacctttcagcaattcagcattatcagcaaaggccacatatccgtcggcggtgattccccaatagagaggaaccttaccaaattgatcagaagccacaaaca

SEQ ID NO: 14455 - DNA, 528 bp, Gossypium hirsutum
  Clone ID: LIB3829-033-Q1-N6-D1
ccataaaagcaggctttcaattagttgaaaacacatttcaaattgcttaacatatggctttatctatcacttcatttgtattcaaatgatggcaccgcaggagcatcaaagctctccaaaacctccgtcttacttccattacccgctgccggttcctgcttctttccaccaccaaaaactcctccgaaccatgaggaggaagactctggtgaaccctgcattgaactgtcgatcaatgcaggggcttggttcggcaattgccccattggaaatccaggcataccggccacattcggtgctggttcttcgatcataattggcatctgtggttgactcagaaatttattcaacatgatcccagcaccttctattaaagcaagcaataccccaccaaccaatgccgatcttgaagcagcaccgagtccttgacgcatagaaaggaaccctccagtggcagcactggctataatcgagttccacagatcttctttctgtcgaacatataccatggtgcaatcgaaggttgaa

SEQ ID NO: 14456 - DNA, 544 bp, Gossypium hirsutum
  Clone ID: LIB3829-033-Q1-N6-D3
gtggcaagtgcttataatagcataaaatatgaagtacaatacacacaagcttagaaagaaacttgtatataacgttataaataatgggtccttcggaaataaaaagaaaaaaagaaaaaaaaaatgaagttaacatcttcacatcccttgtctctacaccaaacaactacatcacttgattaagaataaagtcggtggagttttggggggaggggagggggaacatgaatgacaatggacccaaagaacgaaagagaaaatgatattgtacttccccaagccatttcttttacgaactcaatcctgaaaatatgcatatgatctaaaaggtagttggctgcaagttcctcattcttgttgcacgcaaagaacacttggagcacagttgcacggtcaaaccccattgcttcaagccgttctatggcttcacgttcctcaggtgtgacttgcacagcttgtggcatcgcctcagctaattgccccaaaatgtttccctctccaccttcagcaggttcattgatcaagcgaagaaagtcaccctgat

SEQ ID NO: 14457 - DNA, 468 bp, Gossypium hirsutum
  Clone ID: LIB3829-033-Q1-N6-D4
aaaataaaccccaagggggttaataaaatatttacaaaaattttcaattttagggcataacgctggattcatagaatcaaaataaacaatcacttcaccaactgggggcatttttttgcagcagcatattcatcagtatagaagtcgagactcaaaacatagtctcgattttaaaaacaccacccccttgaaaaggcccccaacagcttgaaagcttaccacaaaaatgaaacatttttccaaccaaccactcttcaagttgtatgaaacctttttatccacagcaaaggcaccggggaatctaatgcttccaggttttcaacttgattggaaaacgctctatttccctgtctatggaactcatttggggatctgcctttcacgactaggctacaatgcaatatctaaaaccatatttttgacagcataaaaattgcttacttcagaaaaattgcttccaactgggtc

SEQ ID NO: 14458 - DNA, 533 bp, Gossypium hirsutum
  Clone ID: LIB3829-033-Q1-N6-D5
gacaacagcaaccagccatcaacattccacatttaatatgcacttaatgcagagaatccatattctattgttcacattacgactgtcaaactcaatcaaaattcttgcaaccaggcaaatatgttttcttcttttggctcattcaacaaaactacaactttggctaaccaaacatataacatccgattctaggtacaccattttctttttccgaattgcttatctaaatcacctaatatgagaattgagaatgcatattattatggcctcaatgaacgatgaaatcagatatatcatataaccatttacttgcaatctcaggaaaccctgttgctgacggcttgatacagggatctaagctgcgtgttccatttatctatagcagtgtacttcttcataccctttgatctgtcaccgcgctccaacagccggttcacttgatcaatatgcccctcaatacgattatccaagatcaatgaaactagcaactgttcaacatctttttctggcacattgagttcctttgatatgaa

SEQ ID NO: 14459 - DNA, 535 bp, Gossypium hirsutum
  Clone ID: LIB3829-033-Q1-N6-D6
caaattaagtggaaaatttactgaagttcaaaataaagcaactacaagattctaagtttatcctctaaaatgttattacaagtgctgtataacaataatcactcggctttctgcttcgaagatttggtacagcagggtagcgcaacctggttgtgcgtctgccgatgaatttgagaacctcatcaattagaattaccgggaaagcaacggcaattacgagcagccattcattggtgctgaggggaacaatcccaaacactcgagcaaggaatggcacatacagaatcaagaagtgcagtccaaatgagactgacatggctaaaaggagccatgggttcacccaaggaggcatcgttaacaagcttccatcttcagatagggcattaagggagttgaacatttcaatggctaccaagacagagagggaaagagtcgaggctttgattttccctgactgaaagtagtcgcatgggtcggaatcgaatttgaacacttgggaacctgctgtgaatggtgacacagaaaaaccttccca

SEQ ID NO: 14460 - DNA, 507 bp, Gossypium hirsutum
  Clone ID: LIB3829-033-Q1-N6-E2
gaatcaaaggacattttcagtatatttaaacaacaaattttcaactattacaagattctgttttgctcaaaaaaaaagccctttgctccctcagttcccaacaaatagaattttaaaaagattgcatcaccattcatcatacatcaatctccttcacaaactaacataatgaaatgaaacagtatatattatatatataaacataaaactaaaaaaaaaaaagaaaaagaagcttccaattccatttccaagatcctgtacatattcttcttctaaaccccactaaagctttcccaactttggcattttaaatgtttcaatcaacatagcaaccattataataatcataaaaaagcttcaacttttcattcattcactcaccaccaattcccccctttgccattgccattcttggattctccctccttgaaattccttcttctttttaagaaaatgataaaaaatttaaaaaaggggtgtcatttaaacaagaacccaaagtgtaaa

SEQ ID NO: 14461 - DNA, 531 bp, Gossypium hirsutum
  unsure (1)..(531): unsure at all n locations; Clone ID: LIB3829-033-Q1-N6-E3
aaaaataaaaagtttagattgaataacccagagttggaaatagtatttatataatacaagatatattgaatccagtcatgagaaataaaaagggtttccatttgactcgggtaaatacaagacatggaaacctacagataaatggtgaggcccttcctctacttcttgatagtttctaattttcgatatatctacaatactagcaaccattaaaacaaattttccataaatctaaatcttggggcttcttcaggcttcataactccattttcagttgatttgcatgcaatgttgctgctgaatttgctgaggagtcacaacttaaaagtgagttctccagagtaacgtaattattgcagacttcttctcttccccaaataggctgcttaagtgtatcaaaatgccactggtgctgaaactgttttctgtatccattgacttgaacgtcaggccaaatcagaggtgtaaccaagctggnggaagttaccaccatccatagtagatccactttctggtgtgaataaactatcg

SEQ ID NO: 14462 - DNA, 461 bp, Gossypium hirsutum
  Clone ID: LIB3829-033-Q1-N6-E4
gagagtaattaatatttgatataattgtaaaatatatttattttcttttgagttttgacatataaattaagaataaataaataaatttatagttagcaaaagcgaaatggaattaggtctgctatcctagcaagatattgtctgccatctctagcaagaggttagggtttccgccattttgtgtttgttttgctttgtgtttcttgttggttttgttttcttgtgagtcggcccctttgtttgattaagatctgccccttcttttacttggaagagcatctgggcagcaaggggtctccttcaagacgggcttggttggagagtaggcagaggctctgagatctctatttggaatgattactttcctacggaaattgccaggaagatcttacagatccccttagcagaagcagagcatgaagatttccaagtgtagaaagaggaaccttccggggttttct

SEQ ID NO: 14463 - DNA, 501 bp, Gossypium hirsutum
  Clone ID: LIB3829-033-Q1-N6-E5
gcaccaaacatctggtgattgctaatcttatatatagcatatgaaatcatattaaatattttttgatcttttcatcacaatattatcataatagctctggtgaaaactctaataataagcctaataaagatggcactcattttccaccacagttgaaaccatggcaaacagagaggacaatgatgaggatcaatgcaatcagtattcctagaacaatcagcttgatcttcatgttttgtagccacatttttctacggattttcgtcccagtattccggaagtcttgagcctgctgatgaaaattctctgttttatccactagcagctctatcttttcccctctatccaacaccttctctatgttctccatcataacacctttgacttcaaaaacctgagatttgatcttagcaagcttgcttatttcttcaggatgctcaacacagtactgcatatgttcttttagttttggcccaaattccttgttcaggctgttggcag

SEQ ID NO: 14464 - DNA, 533 bp, Gossypium hirsutum
  Clone ID: LIB3829-033-Q1-N6-E6
ggcattcggtgacccaaactagaaaaaatgagaggaagaattcaaacagacagagagagagagagagagggagtcggcgaataaatggggtgctatggatagatttgaggattcaaatttcgaataatgggaaggaaactgagctttgatcggaggtaagacgccggaaggtgttgatggcgcggcagtgtctggggtttattacgaaagcacaagaaaggaagggaaagagaataaagaaaacgaaagagaggattaacagagatcaaagaatggaaaaacaacagagaataacagtatgtttggttggatggaattgctatgctattcctgccttattccgcgcgctacagtgattcatacgtttggttcaccgtttaggtgattctgcagtttaactattacagccatattccctcacctcctgtaataggtattcagtagtgagggcactgaattgctattcaacacacacgccgaatacattttcaaattttgggaccaaaatagcctgatttcttcttcccaaaatt

SEQ ID NO: 14465 - DNA, 529 bp, Gossypium hirsutum
  Clone ID: LIB3829-033-Q1-N6-F1
acattcaacctttcaaacccaaaaccttacaaagacaaatacggttacacaaacataaggttccacaaagtcacagttcacaaagtctatatttctttttatatatctctctctttgaacattgttaatttaccaccttgaatatataccggcacccaatattatggatagacccctgctcactaaccccgctgcccattctcctcaattgccctgcttatagactggggggcgattcaaattatggcctacggatactttgaaaatccgccccatcaacaatgcaccgtatcaacatatttcacattctataaattaaccatttaggaattacaccttttagcatctacagggtttgactacttggaagatgagatattgcgtaataataaatgcgcattctcatgggtgcacccacgcattgctgaccccgacctttacggaccccaactttccctataaccagttttacctaagctgggccgaattatagccatagctgatcactgtgataaatggttactcggtc

SEQ ID NO: 14466 - DNA, 371 bp, Gossypium hirsutum
  Clone ID: LIB3829-033-Q1-N6-F2
acaaaaaggatttatctaagccattcaactttaaatcaaaagtacatatagaagcagattatcccatctacaactattaatttctgaaggtcaaaaggaaccaacaggattcagaggtacatttctcccttagatggcatgcgcatctaaaaaaataacatggaaacatctaaagcattaacataagggtttgatcaaacactatcacagcctacattgattatgctatccaccacggaccttcctactcataatcttcctcgtctccgctgccttcttcatcatcatcctcatcattcacctcaaacactgatttgtcaaactcaacatcttcgtctttgggaccctcagcctgtcttttattgtaggcc

SEQ ID NO: 14467 - DNA, 548 bp, Gossypium hirsutum
  Clone ID: LIB3829-033-Q1-N6-F3
atcgaaaagattcttccactaaaatgtaaaaatacaagtatgaaatattttacacaccatgcataccaaatgtatatagttctataatatagtgaacatataaaaggagtcccacgcctagagatgacttataaactaccttacctatgctgaactttagattttcacttattacttttacaaggaagacgaaatgaaaccgggtttacgttctattggctttccctttaacatgccatctaattctttcacaaatatttccatagctcgggctggcaacgtaattggtagcacaactccagcctctcctttcttgttcttgactggtattaaaaaacttgctactccaggtattgcccctactccacctttagctggaccaccataaactgccttgccccacccgaaatccgcatcgccaaaccgggcatgtgtcacatccgacaccaggtaagatcgaataaccgtgaaatgtggtcgaaccttaatcaccattaaatctgctaatgatttcatgtattcttccgttacatcattctttgcttgtc

SEQ ID NO: 14468 - DNA, 499 bp, Gossypium hirsutum
  Clone ID: LIB3829-033-Q1-N6-F4
aaaaagaatacaattattattattattattgggatggtgattattgttttcagagtagaattgtacattggtctacaagtaccacctagctcgcatcgcatcacatgatatataaacccgcactatggtttaaagtacaacaacctccaaagacaaacatagaggaaccctaggatgagaaatacattagtaatgacaacaaaatgaataataatagttcatcaatcaaactagaagtagaaggaaagcacaaacaacagtgttcaactctgacccacttctgctacacttgtaattgtttcagctatccgcaagtgcaataagctgatcaactacacccggttctgcaagcgtgcttatgtctccaagttcatctaactgtctggatgcgattttcctcaaaatcctgcgcatgatctttccactcctcgtttttgggaggccaggtgcccagtgtatcttgtcaggtgctgcaaatgctcctatctgatttcgcact

SEQ ID NO: 14469 - DNA, 530 bp, Gossypium hirsutum
  Clone ID: LIB3829-033-Q1-N6-F5
aaacgttgtaccttttgctccccacttttaatagttttaaagacttctttggtatcgtgcattggctgaaacaccaccatcgttctctcttaatataggtttttgtccactcagatctgcacttccatgataagctctaacacgagacgaaacttgaggacggatcaatgcatcgttcgggttgttacatatcccgagccttatgaggaatgttgccgtgctacctttgttaacaccctcgctttccaaccatatgtgccctcccatcagattcacaaaccttttacatatggcaagtccaagtccagcacctccactattttgactggatccactgcgcggctgtgcaaatttggtaaaaagaattggtatatcttgtgggagaacaccacaaccagaatccttaacctggactcgtaagtagaagtggccttgacttgacactgggtaaaattcaggacgtcgccagtctcttaaagactctggttttgcaactgaagctataattgaaacatagccctcctttgtga

SEQ ID NO: 14470 - DNA, 544 bp, Gossypium hirsutum
  unsure (1)..(544): unsure at all n locations; Clone ID: LIB3829-033-Q1-N6-F6
aaagagaaaccaacaccgaatcttattccngacaaacaacggccgaaccgtactattacaagctctatatacacaagtaccagactacattcttgcatacatcaccccatactacactattaagttacacatttngaaagacctaagcatgcaaacagtaccaaaacccatttgatttgtcgccaaatatgggagaggactcatatctcacacgtcgtaaggaggaggacaagggctccttggtccaacctcgttagccttctcgtatgcatccgatgtggaccttctccgaaaccgatatgattctctgcctccggaaaaaggagataccggaggggtcgatccggccggcgaaaccggaggcgatccgctctggtaaccaggcggctttacgatcataatactacgtgtcactctcgtcgcttcctccggcgcttcatcaccgtacgatcttacactcccgccatcagattccttggcagagttaggccggaaagtgaaagtggagtgctttcggagcttgccaaggccattatcgggtcgg

SEQ ID NO: 14471 - DNA, 383 bp, Gossypium hirsutum
  Clone ID: LIB3829-033-Q1-N6-G1
gaaagtaaagagaatttatgtttcgtccacagcctttttaactgcctaagattgagaaccgcagtcacaatatttttgagaacattaaacaacacattaaatctcttaccccagatgagtctggttctgatttacaaatgaaatcctcccaagggaattgagttactgagtccgcatcctgctgctctctgctgccctgacttgtgcaaagtaaggatgggccatagcctctctagcagttagcctgtcctgatggtcgtaccgaagcaacttatcaagaaaatcaatagcctcgggagaaacaagatgctgattatctgcattaataaatttggaccagggtttgcggctgtgccttccctagatcgcgggcggccgctcgc

SEQ ID NO: 14472 - DNA, 535 bp, Gossypium hirsutum
  Clone ID: LIB3829-033-Q1-N6-G3
aaaatctgttttggagagtttcaactatgatttgtgagctatccatcaactacagaaaccaagacacttatcaagtattcttcccaaaagacgagaggaatgcctgttaatttcaccccgtattcccacaatgccgtattcccacaatggctgcaaactcggcaactttcttgcttctttacaacttagaaagatgctgataaacacaagctccatttaaattcacggaagctagaacccagttttagatcaaataattattataggaaaagcatagaatgtagccactttcttccttttctacctgtttatataagaaagacggcagcagtcaattgaagttgttgcttcataaaagtagtatgctttcctccatatgtgtaggccctataaggctataagctcaaagaatatctcctgaactgagcccttgatgaatctgatggcgtggtgcccttgttttaggaatttggtggacctttccttttctttggtggtttgaagctgccgcttgcaactgaaggtgggacaattg

SEQ ID NO: 14473 - DNA, 473 bp, Gossypium hirsutum
  Clone ID: LIB3829-033-Q1-N6-G4
ccgaaaaatataaaacctaatttttaatcaagttaaaatccaatacctaaatccataactttcacaaagtggagggcctaagagcagaattaaatctatgatatccaatacctaaatccatacctttcacaaagtagagggcctaagagcagaattaaatctatgattggcctagacaaatatatcccccttgggcttgggggaaacgataataaaaccttggtagggggtgggacctaaaactagatcagttttcctcctcacggccaaggcaaactcccgggccaaatctatatcttctggcttcggcaacttccaatcaaaagggaacaacagtggggcaaggggtacctctaaatttggccctgcaaatagcaggcctggacatatcctttttccagccccaaagggaatgaacccaaaatttgtccccaaaaaatctactgaactggggataaacctttcaggctcaa

SEQ ID NO: 14474 - DNA, 514 bp, Gossypium hirsutum
  Clone ID: LIB3829-033-Q1-N6-G5
aagataaaacttaaacattaataaaaagaagatgaaaaagtctaaaaacggtgaaaattcattccctatacaggaattgaacccaaaaataaaccccatttatggggacataaaaaataagcagccccaaaatttacaaaacataccggcctaagctgttaatatattgaacttacaaaagaatgggtaactgactgctaaaacaggtaggtggagaatcctaatccataccaccacccatgttagcccgtggaccttggcacaagttggccttgataagaatgcatatgatggtttagctacttgatctgataatataaaacctattactcggctttcatggaaggcacacagccattggatgtgcttcattaatgcgcataacccaatggacttattgctaaacgggacaagctttaaaccaatattttcattcccaacagtactaccgataacacgggcttaatgccccagtgcccccttgaagctaacctttttaacgagcggcagagcc

SEQ ID NO: 14475 - DNA, 469 bp, Gossypium hirsutum
  Clone ID: LIB3829-033-Q1-N6-H1
gcgaggccatccaaagaagggtgatttatacaatcaagtaatacaacacaacatctggcccttggggaaatcatcaattcataaatggtccatgcatttctcaacaaatcaaatgcgaactcattagatttatgcaataattaaaattgcaacagtttctggccaggattttcttcttctttttttctttttttttatattgcaccatctaaagacggccaccccgcagtgcaagcacaaaatgcagcacaaagccaccctcaatattggagtcccgcgctgtcttgtcatttgcaagttgcttcccggcgtatataaacctttgctgaactggaggaattcctttttttttttcgacccgttccttgataccaacaatggtatcagttggttcaatggcaatttcaatttctttcccggggagaggcttcaccttgatcatgggtcctcccctaagccttaaaactag

SEQ ID NO: 14476 - DNA, 522 bp, Gossypium hirsutum
  Clone ID: LIB3829-033-Q1-N6-H2
gaacttcgtggtgttcattgtagttaattaacagtacagaaagttacaatccaacattgataactaagttataaaaaattttaccttatctgagaaggatataggcttgtcaaagaaaccatttagcaccaaaagcacacacgatagtcaaacaagataaacatcttacttttcgatacttataattctcttcatcttcttccttatcacgaattcttccaagttccattgcctctatcttaaattccaactccaactcatctaacgtttgagggaaggcatggtattcaaactgattgccagattgcaaatcagatccccgtctctcagtatcccatccctcagttctataagctcccatgtttcgattatgaccatcataggaattaaatgagttgccaccataaggtaaacagcctggggatttaaagtggctcgagcgacttttagctcaatcattaccataagcttcatggaatgaagagtatggtaagcacttgattcaaatgcacaaagatcagc

SEQ ID NO: 14477 - DNA, 523 bp, Gossypium hirsutum
  Clone ID: LIB3829-033-Q1-N6-H3
cacagctaaataagtatatactaaatctgggcaacaaccaaaaaaccaaggacagacattccaaataaatatcaaaattctcttgtttttaatagccaaaagtcacttactcttaaatttaatgggtataattacaatagaattaagggttcataacgcaataaaagagatttgattttcatctgggtgaaattcaagggtttgtttatgtatcatgcctaaaatttatcatgcagtcaataaacatggcagacctgaaaataccttgaccgcgtaagaaatttaggatcgaaatagtagagggtaagtacagcaaaatccactgctccagcacaccgaaagcaatggtccttgcttaaacttgtcatgaaaggaaaatgcaattggctttggattgtcgccaggacctcgtataaaaccaattagtgatgcagaaatcaagggattcctcctcgtatcatatattgcaatgagacctttataaatatcatcccctcctttatacgacactgctaatcgctct

SEQ ID NO: 14478 - DNA, 526 bp, Gossypium hirsutum
  Clone ID: LIB3829-033-Q1-N6-H4
aggggaaacctatgtcattgatgtagaatgaaaaacatggtgtatcgcacaaacaaaacaaaagaacatatgattttcatcacaactcaatgacgatatcataatagctaaaagtatccattttatttgttcttacatttatcaacatgcttttcaatttaagaaatccttcattggatcatcgtggtgtacccttttcatccgatatgcctccatttcctcagcagttacctcatcattccatctgacattatacttccgttttctttcatctttctcctctctcctcctctcctcctccttcttaagagcctcggtgagaagtttttcatcgagaaccaagtcctcaggaacatcggttccccaagtaacgtgtttcctctcctgtgcaggagctggggcatcttcggaggacgctttacgagcaatgtttgacttcatcaagtctgtggctgcttctgcagcttcaataccggcagcaccagtacagtaactattgcgaatggtctgcttgcaacacttgtac

SEQ ID NO: 14479 - DNA, 529 bp, Gossypium hirsutum
  Clone ID: LIB3829-033-Q1-N6-H5
ctcaaagatttgtttttatcaaataaaagggaagtttcctgggatgcaactaatcatattgttagagtaaaatgtaacaattatatctatcttctatatcaatgtgtgtataatcataagttcctagtaagacatctgaatgtttagtcaaaacaaccaacaagaaccaaaaccactgcaaaaatccagagctcaagcgttcctatagtttacctacaggcaacatatgagatcaaaggagatagaacaccataatcgatttcattgctccatgtaagtatgcattttatccaatcacatcacttgactctactttttccgtcactttctcaatctcagatccagatatcacagggctggagctcctgagtatatcctcagccatgctaccacttggactttttgctgcatcgccaactcccgattgcaaggggtccatgatggggctagatctagaaccatgctcttccagttgttttggcttattcaaggcttggcagtgcgggcagtaataagttatatatgggaa

SEQ ID NO: 14480 - DNA, 527 bp, Gossypium hirsutum
  Clone ID: LIB3829-033-Q1-N6-H6
ccaaaaaataagttgtcgttaatagcattaatttctacaatagtcatatcaggatcgagtagatccatctcgccaatacaaaccatatatcaaaataaatatgcagaaatttcagaaaaataaacataaaaaccacaccgatctaatttaaaaagcaacctcctaaccctaaccccaactacagatcaactaatagccttttcaagatgaagtaaacttggtcacggccttggtaccttcagaaacggcgtgcttggcaagctcaccgggaagtacaagcctaacagcggtctggatttccctggaagtgatggtgggtttcttgttgtacctcgcgagcctagaggcttcctgagcaagcttctcgaagatatcgttgatgaaactgttcatgatccccatagctttgctagagatcccgatgtcagggtgaacttgcttcaggaccttgaagatgtagatcttgtaggtctcgacgctcttcttaactctcttcttcttcttgtctccggcagccgctccgcctt

SEQ ID NO: 14481 - DNA, 531 bp, Gossypium hirsutum
  Clone ID: LIB3829-034-Q1-K6-A1
gcaaattaccaaacaggagtccctttcgatttcaacctcttttaactgtagaaataaaccgagatggattgtttggaaacccgccaacgcttctgcagcaaaaatagaagcaatgtcaaaattgatttttaccctcgacccagtcggagcaacctattttccagtaagaatctacctcgctggacactatctgaacaggtgctcccgtgtttcccctccatattgacgtcttctacaagtggctgatcccatcaagcgtctataataaaggttaccaaaagtaggcaaataattactagcaatcctccagtttgtaattttaatctttggaggaagatcaagggtccacaatctcttgtaaaaatttttgtattctggttgtattagagtctgtccattatgtaaaaggcatttatgtccactccggacagtatattctccagtcggctcgccagtccatactaagagatcatcatgcggatgcatagacagtgggacatatagaatcctttccacatccatttcctcaaa

SEQ ID NO: 14482 - DNA, 532 bp, Gossypium hirsutum
  Clone ID: LIB3829-034-Q1-K6-A10
ttttggcctcagaccctgaatttcgattgttaattatcactgttctgcaatggcgtcaggttcgaactggacgccaaagcaaaacaagttgttcgagaacgctttagctatctacgacaaggatacaccagaccggtggcacaagctagccagggctgttggggggaagaccgtggaggaagtgaagttgcattaccagaaccttgtggatgacatcaagcagatagagtctgggcacgtgcctttgcccccttacaagaaagctggaggaacaaaggatacaacaatttcatggacgatgaagaaccaaggatgaggaatctcaggctttagtgaagtatgaaccagaaatagcctgtagaatatcaacctttcaataaaaggaaatgcaaagcagcaaacatataaattattgctcttaatttcgtttacatttcccgctcatatatatatatatgttttttgtgtgcttgaatgtaacaagcagccacaacgttcctatacttgcatgtatcaagtatgaaattatagc

SEQ ID NO: 14483 - DNA, 528 bp, Gossypium hirsutum
  Clone ID: LIB3829-034-Q1-K6-A11
cccacgcgtccggtggaaattgatggctcatttggagattcagacggtctcaaggaatctggttcaaagaagagggttaggtccgaatcgtgcagtgcatctagctccaaagcatgtagagagaagttgcgtagagataggctaaatgacaagtacttgcatctcccttcttttgccttttctttgctttgcttttttccccttccaagcgtcaatgtttgcgtaataacaggtttatggagttgggttctattttgcaacctggaaggcctcccaaaactgataagtctgctattttgattgatgctgtccgaatggtgacccagttacgaggtgaagcccagaaattgaaggattcaaatactagtctacaggaaaggattaaagagttgaaggctgaaaagaatgagcttcgtgacgaaaagcaaaggctgaaggcagagaaagaaaggcaggagcagcaactcaaagcaatgaatgcacaacctagcttcatgccacccgcaccatcagcaatccctgctgcat

SEQ ID NO: 14484 - DNA, 524 bp, Gossypium hirsutum
  Clone ID: LIB3829-034-Q1-K6-A12
cgaaagttgttcatcgagacgtaaaatctagcaacatcctgctcgaccgtcaatggtaccctaaggtttcggatttcgggcttgccaaactcttgtgttccgaacggagttatgtgactactcgagtgatgggcacatttggctatgttgctccggaatatgcttgtaccggcatgttaaccgagaagagcgatgtctatagttttggcatacttattatggaagttattagcgggagaagtccggttgactatacccgaccacaaggagaggtgcatttagtggaatggttaaaaaccatggtcggaaaccgaaaagccgaagaagtaatcgatcctaagttacccgtgatgcctgcttcaaaagcgcttaaacgtgtactattagtcgctcttcgatgtgttgatcctgatgcaacaaaaaggccaaaaatggggcatgttatccacttgctcgaagctgatgatctactattccgcgatgaacgccggatcacaaaagaaccttgggattcgcattccggt

SEQ ID NO: 14485 - DNA, 275 bp, Gossypium hirsutum
  Clone ID: LIB3829-034-Q1-K6-A3
gggaaattcaggtaagtttatggtaatgttttgttgactctaatttgttatggttttcgttgatcgaatcaattatagatcatcggatttgggattcaacaaagtacaagtaggacgtgtgcaaaggacattgacagagagtttgagggtctgaatttgttgttaagtcttaaactagtaatggattttccttttgcctgagttctttgataacttaattattgtaaaatggatgtgaacttatatgagaagttgctgctgttagctctttccat

SEQ ID NO: 14486 - DNA, 533 bp, Gossypium hirsutum
  Clone ID: LIB3829-034-Q1-K6-A4
agcgaggcaagaagtgatcaagatcttcggtaatcaaaatccgaatcctgaaggcattggcaaactcaagattatgactatgatcattaatgaaacactaagattatatcctccagtaagttccatggtaaggaaggtagtaactgacgttcaattgggaaagctgattctaccagctgatttggagttgcttgtcccaaatcttgtacttcaccatgaccctcacttatggggagatgatgtaaatgttttcaaacccgagaggtttgcagaagggattgccaatgctacgaaacataattcagctgcatttattccgttcgggttgggacctcgatcttgtgtgggaatgagctttgcgttgatggaaatgaagatggctctttcgatgattctacaacgcttcaccatttttctttctcctacctacagccactcaccatttacccttcttttgcttcaaccacaacatggaattcaggtaatgcttcattctctgtgaatgaaagcctagacatgtgaaaagaatagtg

SEQ ID NO: 14487 - DNA, 428 bp, Gossypium hirsutum
  Clone ID: LIB3829-034-Q1-K6-A5
gttttaaaaaaggaaaaaaaaaggttccttcattctctgttagggcttcactcgcatgtcccaaaggctgccgcagcaccaacgccactttcggtggccaacgatgccgagaaataggtctttcgaccccgatccaaggctgttttctggtaagccttcctctttcctcttttatacttgtttttattgtagattcgaataaaaaagggaaaaaaaacaaaaaaaaatggtcggccacctttgatctgtttttttaaaagtagattcttgtttgatattctatataatatgtttgatacccaatccgtgccctatccctctgaaccacaaaagggaaacaaaaaagttcccaattacaataatgatctttttcgctttattacaccctacaaacagttcctggcattttttttcttcaatttccccag

SEQ ID NO: 14488 - DNA, 525 bp, Gossypium hirsutum
  Clone ID: LIB3829-034-Q1-K6-A6
ctttaaactgagctttgctgaattttcgtgatcgtcgagaaagaaaattatgggaaggaaattcttcgttggcggcaattggaaatgcaatggaaccactgaggaagtgaataagattgtgagtactttgaatgctggagaggtgccttctcaggatgttgttgaggttgtggttagccctccatttgtgttccttcctttggtcaaaacttcactgagacccgatttccatgtcgctgcacaaaattgttgggtcaagaaaggaggtgctttcactggtgaagttagtgcagagatgcttgtcaatttgagcattccttgggttattattggtcattctgagaggagacttattttgaaggagtcaaatgagttcgttgcggataaggttgcttatgcacttgctcaaggcttgaaggtgatagcttgtattggggaaacacttgagcaacgtgaagcaggatctactgtggcggttgttgctgaacaaactaaagcaattgcagcaaaaatatcaaactggac

SEQ ID NO: 14489 - DNA, 533 bp, Gossypium hirsutum
  Clone ID: LIB3829-034-Q1-K6-A7
gtgattctggttcaactcatgaaccaatggtaacacatccaacagaggtgagagaggttaagaatagccatgagccatctagtcatgctcctgttgttgcggatgcctctgaaactgcacaagctctcggcccgaaatcccatgagactgttacaattgatgaagtaggtgacgattcaattgcgcagccaaggcggcagaatgataactctaacaaccagcatgttacacccagcgctcctgcctttgataatttgccagactatggcaatgacattgaagaacaaatgattcaagctgctattgaggcctctaagcgggatgctgaggagttaagtaatactgggccttggcgtaatatgtctcattcagaggatgctgtacttgaagaagcagtttcattgtcctttaagacagcagagcaagagaaggcattgcgtgagcagggttactgtgccggaacatcagaagtggaagcttctataccacctaaggagcatctcgggaacatggcagtctcaaatgggaggtta

SEQ ID NO: 14490 - DNA, 526 bp, Gossypium hirsutum
  Clone ID: LIB3829-034-Q1-K6-A8
aaatatttctccaagtccagtttgttcagtcatggtggagcttcctgctattactgagaatgaactgggaaaagaaacaaaaccatctagcgggagtgaaaatattactccaagtcctgtccacttgtttgcttttgattctactgatagggcacttactccaacagatgatgagttgcaacagtcatcagctgctgaaagggtagatgctaagtctgttgatgttagcaatgaagtagagcccactgcacaaccagcatcttctcaggattttgctgctgaagcttctaatgaagattttgcacctgagaaccatggtgaggcgaaggtgtctccaggaattaagagtgtagcggatggtcatgttgaaagggatgttgaccctctggagctggaagcatccgtggacgaagatattgctgctgtgccatccagcatggagcttgttcccggagatcagagtaaagtgcatgttcaagcaggagttgcaggttgcgaaggtgatgatggtattcagggcagagac

SEQ ID NO: 14491 - DNA, 524 bp, Gossypium hirsutum
  Clone ID: LIB3829-034-Q1-K6-A9
cggacgcgtgggcggacgcgtgggtcaaaacctgagaaacccgaaagggccacatacgctgccgcccctgtcatgaagaagaaaactgctaaacagagacgtgctgcccaaaccattgaagatgaagaggaattgacccgggaatatcggctattgaagaaactaaaaaagggggctattgatgaaactgagtttgcaaagttgacaggaactgaagatttagtttgaactttcaagtatgtagttttgcagggtttgacttgccctttccctttctgaaggaagagcttgaggcgtacggccgttactttttctagaagaccaattctctacagctcttttaacaatggattttggaaagtagagttttggtgttcaagtgatggaaagtagacgcgcagcatattgatatgtctgaatttatataattgttccaatctctgaatttctttatttcacatttgattttgttgattcagtcactacaactattgtaatgtgtatgttaggggaaccagatttat

SEQ ID NO: 14492 - DNA, 246 bp, Gossypium hirsutum
  Clone ID: LIB3829-034-Q1-K6-B1
gtcagtatgaaatgattcatcaagttctcattatcctttttcttcttaaactacaggatatcacatacctagttttatgtcagtcagttagattgtcaccattttcggctgacattattcttaagaaattcatgatacatattttctatggtgagattttgatttgaatcacggtgtagtccggttgtttatgtgatcacatttaagaagtgaatttcaataagctcaatatctgtattttgtctt

SEQ ID NO: 14493 - DNA, 513 bp, Gossypium hirsutum
  Clone ID: LIB3829-034-Q1-K6-B10
gagaattggaaccctaagtttgtggttattgttgcacaaaaaaaccatcataccaagtttttccagcagggatctcctgacaatgtgctacctggtactgtcattgacaacaaagtatgccatccgaagaacaatgatttttacctttgtgctcatgctggaatgatagggaccacaaggccgacccactatcatgttctcttagaccaggttgggttttcagctgatgatctgcaggagcttgttcattctctatcctacgtgtatcaaaggagcaccacagccatatctgttgtggcccctatttgctacgctcatttggcagcttcacagttggggcaatttatgaagtttgaggatgcttcagagacatcatcgagccatggtggggtgactgctccgggagcaatttctgttcctcagcttcccaggttgaaggataatgtcagcagctccatgttcttctgctgaaaaccgttgaaccatctttttgtatagggcttttggattttg

SEQ ID NO: 14494 - DNA, 517 bp, Gossypium hirsutum
  Clone ID: LIB3829-034-Q1-K6-B11
atggagagtagaatttaacctgttaggattctttgtgtgcaattccttgtaccttggaagacctaaaggcggtgctcgtcgcccccgttctgaacctgctctcccattgctgtcttctagtagagagggtgatgatttgaagttttctggggtccttaaaaagcttggttactttatcgactcttctgatggccttcttctttgtggtcgtcacccgaagacctattttgtatggaatcccatcaccaagcaacaacataaactacctcatccgcgggtgcaccttgaggagttgtgcatggccttcattgttgaagactcacctgacgatgaaatctgctacagggttgttcgtgcaaaatgtgaaagcagattcgaggaggtcaatgttgttacaatagaaactttcttgtcaaagatcagtacgtggtgttattccaagctgagatgttcttcaactatatctctatctccttggacttcaggtaccgtgattggagatgtcatccactggtat

SEQ ID NO: 14495 - DNA, 530 bp, Gossypium hirsutum
  Clone ID: LIB3829-034-Q1-K6-B12
atgggcagtgccatggatgtggagttcatgcttgtgaggatggcagcaagtatgtgggggaattcaagtggggtgtcaaacatggatttggtcattaccacttcagaaacggagacgaatattttggggaatatttttccgacaagatgcatggctttggtgtttatcaatttggaaatgggcaccgctatgagggggcttggcatgaaggaagaaggcagggatttggtacatacactttcagaaatggtgagacacaatccggtcactggcaaaatggtgctctcgatgttcttagcgcacaaaatactcgacccagagttcttcacgctgtccaggaagcatggcgagccgctgagaaagctcgtgaagttgcaaagattgacaagagagtgcataaagctgtgtcagctgcaaacaaagcagccaatgctgccagagtggtggctgttaaagctgtccagaaacaaatgcatcatcataacagtgaagaaataccaaccgtgtagcctgaacctaatacaaggaat

SEQ ID NO: 14496 - DNA, 516 bp, Gossypium hirsutum
  Clone ID: LIB3829-034-Q1-K6-B2
cgaacatcaggtgtgcaccatccgaactgagactacaaaatcggaggatggagaccatatgtctgttattgataacgttgtagataatgatgatgatgaaactgaaggaactcgtgatagcgaaaatcaatcagaagaatctgctcctgaacttgataacgtttcttccgagcctgcaaccaaggaggatggaaacaatatctctgttgctaataacatttcagatgatagtgaaaatcgatcagaagaagctgctcctgaactcgataaggtttcttctgagcctgcaaacatggaggacagaaacagtatctctgttgttcataatgttgcacatgatgacaatcgtgaagaaacggttcctgaacgtgatgaggtttcgtatgtaaatactgaaaagtctgtagaaacaaagggaagtaagctatcagcattagcggaaccgttcaatcccggagcactctacattgctgttacaagtgtttatgatgtaacagcctgtcaagctatgcttgc

SEQ ID NO: 14497 - DNA, 526 bp, Gossypium hirsutum
  Clone ID: LIB3829-034-Q1-K6-B3
tgattccattgatttctacaaacaacaaataaaagaatttgataaaagaatgaaactagagcgccagaaaattctcaaggactccaaatctatcctgcctgttgcttttgtatcattcaaatcacgttggggggctgctgtttgtgcccagacacaacaaagtaaaaatcctacactgtggttaacagattgggctccggaaccccgtgatgtttattggcgaaatctggcaataccatttgtctctttgaccattcggaagctaattatatcattatcagtatttgccttggtatttttctacatgatacccatcgcatttgtgcaatctcttgcaaatttagagggtcttgaaagagttgctcccttccttaggccagttatagaactgaacttcatcaaatctttcttgcaaggttttcttcccggccttgctcttaagatctttttgtatgttcttcctacaattttgatgatcatgtcaaaaattgagggacatatagccatatcaactcttgaacgacga

SEQ ID NO: 14498 - DNA, 530 bp, Gossypium hirsutum
  Clone ID: LIB3829-034-Q1-K6-B4
tttgacgattcagcttttaggaaagtttatcctttcaaaaaccatttctccgactttcctttactttcctttcatttctctgtttcccctctgttatcaatctggctctcgtctctgatccattctttgttgaatctcagcatacaccggaacccccatttccaggtacgtctcctccttccttcttaaagtttccgttgttattacatgcgcaaggttgtttgcagatcttattgtacgtttgaaaaagaagcttctcgatctgttaatgttttgttgtatatcgtgtatataagctcctatatgtgaacgatcttgacttttggttgtgcattttttgattatcgtgagggagtcgctttctattatcaccttcggccattgttgtcccactcctactttgaccgcttttctacacgctattgcttcggctgcaaatgcggaagataccccgtggttgatctctgagtaggaaagaaggacaagcctttcctcgtctctgaccacaacccctgaggcagatttatgga

SEQ ID NO: 14499 - DNA, 519 bp, Gossypium hirsutum
  Clone ID: LIB3829-034-Q1-K6-B5
ctctgtcccggcctcgtccttttgttcctccagtcagcacaattctcctccttctacagtgcatgacccaaaccctctcttaccttaaagtctccaatagaccaagaagtttagtaaggtaaaggctaaccaaaaaaaatggaagaagaccgccgagttcacccggattgtatcaacgcatcgaatccgtaccatgaatgtgttgaatattgctttagaaagattgttgaagccaaggcaaaaaaaggatcaagaaaaaccagaaaccgtgcaacgcgagcatgatcaacctgttagatgtgttgcttaccaagaacaagatgtacaaagtggagcaccagaaccagaacaaaattccgatgatgacaataataaccagctagctgaggagaacattgaaggagacattacaaaacttactggtagacagaaaaaattattcgagttgagactaaagatgaacgaggcaagaaaagctaatcaaacggctatggtggctgaaaagaaacgaatggaagc

SEQ ID NO: 14500 - DNA, 485 bp, Gossypium hirsutum
  Clone ID: LIB3829-034-Q1-K6-B6
caggagtcgagaaaaaattcctcttttcctgccgtcaacgggcttaatctttgtttggttcccgagaatatcaacaatgactcgcggcaaccagagagaaaaagatagagaaagggctcaatccaggtcaggcaacaaagggaaagctggttccaaggacgatggattgacccctgaacaacgccgtgaaagagatgcaaaggccttacaagaaaaggccgcaaagaaggcagcgcaggcggcagctggaggtaacactgccggcggtgctggtggaagtaaaaacaagaaataatataataaagacggtgagatgatctaccgtggaggttaaagttagtgttaatctgttgatcggggaatttgatctttggtttccagtcttcgtttcgtgttttttaaagttcaacaaaccctcggcttgcttatatatttggcattgatgttgactgttaatggaattgatttcctatatagcattatgg

SEQ ID NO: 14501 - DNA, 532 bp, Gossypium hirsutum
  Clone ID: LIB3829-034-Q1-K6-B7
gaaattttatagcaaaaccccttatttctccgatgtcgatcttcgagtacaatgggagtgccctaatagccatggtaggcaagaactgcttcgccattgccagcgatcggagactcggagttcaactccaaactatcgccaccgatttccagaggatttataaagtccacgatcggctcttcctcggtctctccggcctcgccaccgatgctcaaaccttgtatcaaaggcttgtctttcggcacaagctgtatcagctaagagaagaaagagacatgaaacctgagacttttgctaaccttgtttctgcgattctttacgagaaaaggtttggtccatacttctgccaacctgtaattgctggattaggagatgaagacaagcccttcatttgcaccatggattccatcggagccaaggagcttgcgaaagattttgttgtagctggcactgcctcggagtctctctatggtgcctgtgaatcaatgttcaaggagggcatggaacctgaggaattgtttgagacggtttc

SEQ ID NO: 14502 - DNA, 517 bp, Gossypium hirsutum
  Clone ID: LIB3829-034-Q1-K6-B8
ggtgatctcctctttgactgcttcacttaggttcgatggtgccttgaacgtggatgtaacagaattccagaccaacttggtcccttacccaagaatacacttcatgctttcttcatacgctccagtcatctctgctgagaaggcttaccatgagcagctatcagttgctgaaatcaccaatagtgcctttgagccctcatctatgatggccaagtgtgatcctcgccatggcaagtatatggcttgctgtttgatgtaccgtggtgatgttgtgcccaaggatgtcaatgctgctgttgccaccatcaagaccaagagaactattcagttcgttgactggtgcccaactggattcaagtgtggtatcaactaccagccacccactgtcgttcctggtggtgatcttgctaaggtccagagagccgtttgcatgatttccaactcaaccagcgttgctgaggtgttctcccgcattgaccacaagtttgatctcatgtatgccaagcgtgcctttgtt

SEQ ID NO: 14503 - DNA, 529 bp, Gossypium hirsutum
  Clone ID: LIB3829-034-Q1-K6-B9
aatttgtgaatccaaaagactacgataagccagttcaagaggtgattgtggagatgaccggcggaggagtggatcgcagtgtggagtgtacagggagcgtccaagccatgatttccgcttttgaatgcgtccatgatggttggggtgtttgtgtgctggtgggtgtgccaaagaaagacgatgcattcaaaactcatccaatgaatctactaagtgagaggacccttaagggtgctttttatggcaactataaaccacgcactgatattcccatggttgtcgacaaatatttgaacaaggagctggggctggatatggacaagttcatcacacactctgtgccttttgccgatattaacaaggcattcgactacatgctccagggtataggtctgagatgcatgattcatttggatgcttaaggaaatgttgctgctgtatatttgcccatccaaggatcaaaactctaatgttttgtcctactatgtgttatattatgtgcctacttaagctacctttcccggttata

SEQ ID NO: 14504 - DNA, 63 bp, Gossypium hirsutum
  Clone ID: LIB3829-034-Q1-K6-C1
aaaaaaaaaaaaaaaaaaaaaaaaaaaaaaaaaaaaaaaaaaaaaaaaaaaaaaaaaaaaaaa

SEQ ID NO: 14505 - DNA, 528 bp, Gossypium hirsutum
  Clone ID: LIB3829-034-Q1-K6-C10
agaacagctcgtgctggaagatctggtgttgctatttcactagtcaatcagtatgagctggagtggtatcttcagatagaaaagcttattggcaaaaagttatccgagtatcctgctcaagaagaggaagtcttgcagtacttagaaagtgtcacagaagccaagagactatcacagatggtaacccaagtttcttttagctgtctatattttcatatttgatttgaaagtaaaatgtgatttatattatattccatgtttgataatgttccatacttaattttatttcatcccgaagagttacttaaatagcatgtagaatgtcttccttgtaatggattcatctatttgcttgtatttcttgttctatagtattttgattttgctgtttatttgaaatttcagagcatttttgtgaactctttcttggatgacaattttatttttattcaacactgcagaaacttaaagaaattggaggcacaaaaaagaggaggggcggagatgatgatgatgaggatatagaga

SEQ ID NO: 14506 - DNA, 530 bp, Gossypium hirsutum
  Clone ID: LIB3829-034-Q1-K6-C11
ggagataagaaggtcattgagcaattggtttctgcatacaaccaagattttaatgcctccataccagagggtgtgaatccaattgatgtagcagctctagccaaatattatattgctagtcttcctgagccattgaccacctttgagctttatgatgagatcaaaagtgcccgttctagcatacatgctatgaggaatgtactgaaaatgcttcctagtgtaaattacatgactcttgagttcatcactgcattgctgcttcgtgttagccagaaatcagtccttaacaagatggatgcacgaagccttgccttggaaatggcccctgttattatgtggcagaaggatagaaaaccagaatcttataggaaatactggagtcatccactcaaaagtccttctaagggtagcatggattcaacccctacttatagtgcatgggacatgcttgaagatggagaagatatggatgcttcctcccacattcctttggatgatggtatcccggttgattttggtgccattgagga

SEQ ID NO: 14507 - DNA, 551 bp, Gossypium hirsutum
  unsure (1)..(551): unsure at all n locations; Clone ID: LIB3829-034-Q1-K6-C12
gtggnnggggggggggggggggcggccccccccccccttttttttttnatatatatttttttttttcccccccccaaaataaaaaaaaaaaattttgttgggtggggttttctcccttaaaaatcccccccccatttttttttttttctctttcgcggggggggggggntattttttttttttttcccccccccaaccatttttnnnannngggggggggtggggggtggctttttttaatcaccccccttttttttttggagtggaaaggagagaggaaaaaacccccccccccttttttttttttttttttttttgtggggggggnggnaccttccctaaaaaaaaaaaaaaaaaaaatccctttttttttttttttttcttttgtgggggggccccgccctattctcacaaggaagagagagtttttttttgtggccaggggtttcccccccccccccccacccttttttttgttggggcgccccgcccccccccccanngggggtgtttttttttttggttttgtggggggtgtttttttttttttt

SEQ ID NO: 14508 - DNA, 526 bp, Gossypium hirsutum
  Clone ID: LIB3829-034-Q1-K6-C2
agacaatgttctttacattgttgagaatatcaatgttgctgctattgaaacaaccttatggtcaattgaatggggcattgctgagcttgtgaaccatccagagatccagcagaaactccgcaacgaaatcgacaccgtactaggacccggtgtgcaggttaccgaacccgacacccataagcttccatatctgcaggcagtgatcaaggagacactcaggctccgaatggccatccctctactagtcccacacatgaacctccatgatgcaaagcttggtgggtatgacatccctgcagagagtaagatccttgtgaatgcatggtggttagccaacaacccggctcactggaagaacccagaagagttccggcccgaaaggtttttcgaggaggaatcgaaggtagaagcaaatgggaatgacttcaggtatcttccatttggtgttggaaggaggagctgtccagggattattttggcactgccaatcctagggatcacattgggacgtttggtgcagaatttt

SEQ ID NO: 14509 - DNA, 285 bp, Gossypium hirsutum
  unsure (1)..(285): unsure at all n locations; Clone ID: LIB3829-034-Q1-K6-C3
aaaaaaaaaaaaggagacccaaaaaaaaaacgaaaaaggggggggggggggccaaacaaacccccaaccctgtgggagaaaaaaaggacaaaaagggggggggttttttttttannnnnnntnaaaaaccccccaaaaaaaagaaagggggggaaaaaaaaacaacccccccctaaaaaaaaatgagagagggggaaaaaaaataaaacaacaccccccccctcctcgggggggggggggggaaaaaaaaaaaaacccaaaaaggggcccccccccccccccccc

SEQ ID NO: 14510 - DNA, 528 bp, Gossypium hirsutum
  Clone ID: LIB3829-034-Q1-K6-C4
gaattctcctaggtgcttgttcgggtcagctagtcttggagagattgcgattttagctggtggttgtgattctcagggtaacatcctgagcactgcagaaatgtacaattccgagactcagaagtgggagactctcccaagcatgaataccccaaggaagatgtgcagtggggtatttatggataagaaattctatgtaattgggggaactggtggagtgggaaatgatgcaagggttctcacttgtggggaggagtatgatttagagttaaaaaaatggactaaaattcctaacatgtctgtggcagctggtgaggctgagaaacctgtggcacctggggcacccccactggttgcagtagtaaacaatgaactgtatgctgctgaccatgctgacatggaggtaaaaaagtatgataaggagaaaaaatcatggttgactatcggaagattgcccgaaagagctgtttccatgaacggttggggtcttgcattcagagcatgcggtgatcgccttatagtgatcgg

SEQ ID NO: 14511 - DNA, 528 bp, Gossypium hirsutum
  Clone ID: LIB3829-034-Q1-K6-C5
tgccctcagaatgccggtggcaatcaagatgtgtctaaaggaactcctgcttctggtggtgatcaaacaggttctggagttcaacccaagtctcccagtccaacggaactgcttcgaaccggtgaaagtgctaagagtgattgtgttgaagtttgtgataaagaagttaggccctcagaagcatcatcatccgagacagctatgcaacctttggaaacagcagttcctgtttctgatatctcacaagacaagagtattgaacagtcccggtcagaagcagatgcaagcaagtcggaggagaaatcagtggctgctactggccctgataacattccagattccagccagctttcttgcgataccacaatcactgagagtggcaaggaggctaagggagatggcactgaccctattgttgagccctctagcaatcaattagaattatctgcggcatctcctactaaggtagaatctgatcagttgaatcagaatagttctgaaaatgaaacagcgatctcttcagaagac

SEQ ID NO: 14512 - DNA, 528 bp, Gossypium hirsutum
  Clone ID: LIB3829-034-Q1-K6-C7
aaaggatggcagccagagctggttttaatgctccgaggttgaatactgaaaacatcaggtctactgatacttcgcttaaccccgagattcgttctccttacttgacaatacctcctggtctcagccctacaacattgctggactctccggtttttgtttcgaattccttggcacagccatccccgactactggaaagttctcattcattcctaatgttaatgataggagctgtatcccagagtctcgtgataaaagtgaggataactattttgaagacatcaatgcatcatcatttgccttcaagcccattgcagaatcgaattcctcttttctccttggtgcgacgagtaaagttactccggccagtcttcctcagcagtctttttctaacgttgaagtttcagttcagtccgagaattctcagccatctcgaagcgtagacccgaggaaactgcaacaacaaaacagcaacatgcttagccttcaggcagatttcttgaggtcatcaactgaaaaagatacgggga

SEQ ID NO: 14513 - DNA, 540 bp, Gossypium hirsutum
  unsure (1)..(540): unsure at all n locations; Clone ID: LIB3829-034-Q1-K6-C8
cccacccctccnccanatttgaatgaaaaagaaaaaaaggaaaaacaaaacggaatagaataatgatgaataaccacctttgaagtgaatttttttgtctgatctctattgacttttgtgtgtattttgctattctcttcgtaaacaaaaaaaaaaaggtccccctttacaatcaaaacttgaaggctttatagccaaatacaagcaggttcttgctattcttttgctcaaatcgcaggtcgtgaagacgtggaagggcgcatggacatggggctcgcgatgtgcgggcctggggtcgtgcttggcgtgccgacgtgggacgaatggagactgcggcgcaaaagggtagcctagggtttgctgttttctgattgtttaggttagaccatgggtattgggcttatgtaaacgggccaaaattatttgggttgttttatgtaattgggctggctttatgcttttgtatgtgtaggggttgaaattgggtatttggtttatttgggtttgttgggcccgggtgaaaattgggccctacactcc

SEQ ID NO: 14514 - DNA, 525 bp, Gossypium hirsutum
  Clone ID: LIB3829-034-Q1-K6-D1
cagagctaagtgagttggtgtgaggatgagtcgtggtgcagcagctggagctaagggaaagaagaagggagcctccttcaccatcgactgtgcgaagccggttgaggataagatcatggacatcgcttctttggagaagttccttcaggaaaggatcaaggttggtggcaaagctggtgctctaggtgactccgtcactgtcacccgcgacaagacccgtatcacggttacctctgactccaacttctctaagcggtaccttaaatacttgactaagaagtacttgaagaagcacaatgtccgggattggcttcgggtgattgcttccaacaaggaccgtaatgtttatgaactccgctacttcaatattgctgagaatgaaggggaagaggaagaatgagcaatcagttcagttacttttctctgttacctatctggtttattagttctgaggaaacttgtttgtgtcaaatcgttggacttgtttgggtttgctttttgacccttggctttattttcaatgaa

SEQ ID NO: 14515 - DNA, 524 bp, Gossypium hirsutum
  Clone ID: LIB3829-034-Q1-K6-D2
agcaatcactcggtcaagggagatccccacatccggatcgagtcgctgccgccactggtgctgcagctgttgcacccatttcagtaggttcaaacgcaaagccgtccagcttcgtcagataccgagagtgtctcaagaaccatgccgccagcatcggcgggaatgtgtacgatggctgcggcgagttcatgcctagtggtgaagaaggaacactcgaggccttgaaatgtgctgcctgtgactgtcatcgcaactttcatcgcaaggaggttgatggggagacccaaatcggggctaatcccagtagaactttgatacttaacccacttcagttgcctcctccgttgccatccccaaccatgctgcaccctcatcataagtattcaattcatacaagtccgtccagtgcaatagttgcatcgatgaataacatggcgttcggaagcggcggtggcggtgggaacgagtcttcaagcgaggatcttaacgtgttccaatctaacgccgacggagtgccgccgcct

SEQ ID NO: 14516 - DNA, 523 bp, Gossypium hirsutum
  Clone ID: LIB3829-034-Q1-K6-D4
gaacgaaccagcaacttttactggttctgaggttagaatgatcaatgatgatgttcctctggcgcaatttgctgttgcttttgagggagcttcttggacagatccagattccattgcgctcatggttatgcaggcaatgttgggttcatggagcaaaaatgctgggggtggaaaacacatgggctctgagctggtacaaagagtcggcattaatgaaattgcagaaagcatgatggctttcaacaccaactataaagatactggtcttttcggtgtctatgctgttgccaagcctgattgtttggatgatttggcttatgctattatgtacgagacaaccaagctagcctatcgtgtttcggaagctgatgtcattcgtgctcgtaatcagttaaagtcatccttgatgcttcacatagatggaaccagtcctgtagctgaagacattggacgccagctacttacatacggtcggagaatcccatttgctgaattatttgctaggatcgacgctgttgacccc

SEQ ID NO: 14517 - DNA, 525 bp, Gossypium hirsutum
  Clone ID: LIB3829-034-Q1-K6-D5
cgagttctttgttaacgaataaggatcttttaagatacgccggatccgctaaaatacgccgatccccgttcgtcttccgatcatatggggctgcttgaccagttgtgggatgataccgttgcgggtccccgacccgataatggtctcggcaagctccgaaagcactccactttcactttccggcctaactctgccaaggaatcggatggcgggagtgtaagatcgtacggtgatgaagcgccggaggaagcgacgagagtgacacgtagtattatgatcgtaaaaccgcctggttaccagagcggatcgcctccggtttcgccggccggatcgacccctccggtatctcctttttccggaggcagagaatcatatcggtttcggagaaggtccacatcggatgcatacgagaaggctaacgaggttggaccaaggagccctcgtcctccttacgacgtgtgagatatgagtcctctcccatatttggcgacaaatcaaatgggttttggtactgtttgcatgctt

SEQ ID NO: 14518 - DNA, 524 bp, Gossypium hirsutum
  Clone ID: LIB3829-034-Q1-K6-D7
ctccccttgctttaacctattagaagtagatcttctcattcttcctttgtttttgaattttacactgtcttagtgacattgaagaaatatatgtttctgtaatatgcagtgacaccttcaatgaaaattccccgcctacaaatgatacaatatatatctcatcacttggtgctgctgtgtacaaagcaatgtccaatggtgacaaggatgctgtgtggttgatgcaaggttggcttttctactcggactcaactttctggaagccaccccaaatgaaggcacttttacattctgttccagtggggaaaatgatagttcttgatttattcgctgatgtcaaaccaatatgggcaacttcttctcaattttatggcactccttatgtctggtgtctactgcataattttggaggaaatattgaaatgtatggaacattggatgcaatttcttcaggtccagtggatgctcgcatcagtaaaaattcaaccatggtcggtgttggcatgtgcatggaaggaatagag

SEQ ID NO: 14519 - DNA, 527 bp, Gossypium hirsutum
  Clone ID: LIB3829-034-Q1-K6-D8
atcaaaagaaaaagcaaaagggagggcctcttttcttcacaaccaccatgagctgcgactcttcaataaccaagaggctggatggcaaggtggcactgataactggtggtgccagtggcttaggaaagtgcacagccacactttttgtcaaacatggagccaaggttctcattgctgatattcaagacgaactgggcgactctgtttgccaagagcttggaactgaaaacatcagctatgtccactgcgatataacatgcgaatccgatgttgaaaatgccgtaaacttggctgtctccaagtacggaaagctcgatatcatgttcaacaatgccggcactcatggtgacaacgaaacaagagtgacacacgccagcactgaagacttcaagaaagtgtttgatatcaatgtgttgggtggtttcttgggtgccaagtatgctgccagggtcatggttccggccaagaaaggttgcatactattcacatcaagtcttgcttcaaaaatcagcttcggtagcccccat

SEQ ID NO: 14520 - DNA, 531 bp, Gossypium hirsutum
  Clone ID: LIB3829-034-Q1-K6-E1
cccacgcgtccggcagtccctaggaacaattaaaaagaaccgaaaaaaaaaacacagattaagacagaagcatggccagccagctcgtaggaacaaagagagcttgtgtcgtgggtggcagcggattcgttgcctcattgctggtcaagttgttgctcgagaagggttacgccgttaacactacagtcagggaccctgacaaccagaagaagatctctcaccttgtaacactacaagagttgggagacttgaagatctttcaggcggatttaactgatgaagggagctttgatgcccctattgctggttgtgaccttgtcttccatgttgcgacacccgttaactttgcttctgaagatccagagaatgacatgatcaaaccagcgactcaaggagtggtgaacgttttgaaagcttgtgccaaagcaaaaacagttaaacgagtcgtcttgacatcatctgccgcagctgtgtctatcaacacactggatgggacagatctcgtcatgacagagaaagactggaccgata

SEQ ID NO: 14521 - DNA, 481 bp, Gossypium hirsutum
  Clone ID: LIB3829-034-Q1-K6-E11
ttttttttttttttttttttttttttttttttttttttttttttttattttttaaaaaattttttttatactttaaccataaaaaaaaaaacaccacaaaacaaaaacaaaaaaaaaaacacaaatcaaaaccaaccccaagagggggcgggaaaggtaaaacatgaacaaactagaaaaaaaaaaaaaaaaaaaaaaaaaaaaaaaaaaaaaaaaaaaaaaggggccccaaaaaaaaaaaaccaaaggccacccacgcggaaacgaaaaaaaaaaaaaaaacaaaaggcaaacaaaaaaaaaacacagggggccgaaaaacaaaacaacgggaaaggaaaaaccctggcccccccaaacccaaccgccgcaaaacccaacccccccgggccggggggcaaaaaaaagagcggccccgcccggatgcccaataaaaaacgccccccaaccggaaaggaaaacggcccccccccgggagcag

SEQ ID NO: 14522 - DNA, 525 bp, Gossypium hirsutum
  Clone ID: LIB3829-034-Q1-K6-E12
gccacgtcgacgctccgggacatatggtcgacagctacttcgacgctgggttcgatgtcgacacccttgaccttgatgtccttaacgggccagctttattagtggatgtgccgagggatagtaatataaccgctaaagtgatggaatcattgaacattcccaaaggagtgcgtcgtgttcttttcagaacattgaataccgacaggcggcttatgtttaaaaaggagtttgattcgagctatgttggattcaccacagatggggcaagatggttggcaaagaacactgacatcaaacttgtaggaatcgatttcttatctgctgcatgctatgatcattccgttccagctcatcttgagttctttgaaggcagggaaatcattctagtggagggcttgaaacttgataacgttccagttggaatatataatgttcattgcttgcctttaaggttgcttggttctgaaggatcgcccattagatgcattctcatcaaatgatcccaactccttcactgttcttatg

SEQ ID NO: 14523 - DNA, 525 bp, Gossypium hirsutum
  Clone ID: LIB3829-034-Q1-K6-E2
ggaaaaacaagtccgtaactccgctcagatccatcgttccggaggcatgtccgttctggtgactggagcggctggtttcgtcggtacacacgtttcccttgccctcaaaaaacgcggagatggagtcgttgggcttgacaatttcaacaactattacgacccttcgttgaaaaaggcgaggaaatccctgcttaacagccacggcattttggtggttgaaggcgatttgaacgacgccaagctgttggctaagcttttcgacgtggtggcttttactcacgtgatgcatttggcggctcaagctggagtcaggtacgccatggaaaaccccaactcttatgttcacagcaacatcgccggtctcgtcacgcttctcgaaatttgcaaatccgctaatccccagccagccgttgtctgggcctcctccagttccgtttacggtctcaacgaaaaggttcctttctctgaggccgacaggaccgaccagccggctagtttgtatgccgccaccaagaaggcaggcga

SEQ ID NO: 14524 - DNA, 522 bp, Gossypium hirsutum
  Clone ID: LIB3829-034-Q1-K6-E3
gggggcttcaagtattgatgagcatttccgttcagctccttttgagaagaatatacctgtacttttgggtttgctaagcgtatggaacgtttcatttcttggatatcctgcaagagctattttaccatactcccaggccctcgagaaatttgctccacacattcaacaggtcagcatggagagtaatggcaagggggtgtcaattgatggtgtgccacttccttatgaggctggtgaaattgattttggtgaacctggaacgaatggccagcacagcttttatcaactaatccaccagggacgtgtaattccttgtgatttcattggtattgtgaagagccagcaacctgtgaaccttaaaggtgaagttgtgagcaaccatgatgagcttatgtccaactttttcgcacagccggatgccctagcatatggaaagacagcagagcagttgctgaaggagaatgtttcgcagcatcttattcctcataagacgttctctgggaatcggccttctctcagtct

SEQ ID NO: 14525 - DNA, 532 bp, Gossypium hirsutum
  Clone ID: LIB3829-034-Q1-K6-E4
gctgaaaattgccagattgtagtccttggcacaggcaaaaaggccatggagaagcagattgagcagctggagatccaataccctgacaacgttagagcagtagccaaattcaatgtcccattggcccatatgattattgctggtgctgattacattttggtccctagtagattcgaaccatgcggtctcattcagctgcatgctatgcgatatggaacagttccgatagttgcctctactggtggacttgttgacacagtcaaggaaggattcacagggttccaaatgggagctttcaatgttgaatgtgatgaagtggatccaagtgatgtgattaaggtggtaaaaactgtcaagagagctcttgcaacatatgggactcaagcactgaaagaaatgatccagaattgtatggcacaagatttttcatggaagggaccatcaaggttgtgggagaagatgttgttgagcctcggggtggctggcagtgaacctggcattgaaggagaggaggttgctcctcttgccaagg

SEQ ID NO: 14526 - DNA, 462 bp, Gossypium hirsutum
  Clone ID: LIB3829-034-Q1-K6-E5
caagagtgaagtaagggcagtgcagttttatcgttgcataattttaggatcttgaattccatacgatattgtttttttcatgctttacttgcctgtgctcgacatattggagtagaaatgtgtttatgagttcaggaggttggactgagaggacttacaagcaagaggcacatgaagatcgtgctgagatggatgagagggagacaaaacattaggctaatatgcaaccatgtggggcctcacaaacaatttctgtaaacaacttggttcactaaaccaagcatcagccacgcaagagctgtccataattcctcaacttctacaactagtttttctgtcgatacttctagtccaaagtcgtcttcaggttaggttgtaccacgcttttgctggctgtaataccatcacatgtactgtttttttgcaataatgtaatacaattgttctgttgtcatgttgtgg

SEQ ID NO: 14527 - DNA, 525 bp, Gossypium hirsutum
  Clone ID: LIB3829-034-Q1-K6-E6
caaagataggaacattgagcaaagagagtgggaaagactggcaatttttccttgttttcgtagctaaaaactaaatccaaaagcaaatcatcggtggacgcttaccggaccgggaacatgccatccggaagacaaccaggttccactattgtccgacgaggaatcggaccgagatgtagcttacgagtcaggcgaaaaggttcacatcgtcggaatcgacgaaccggacgatgaaggcttgttgggtaccccacctttttcttggaaaaagctatggcttttcaccggacccggttttttaatgtcgatagcgtttttggatcctgggaatttggaaggggatcttcaagccggagctatagccggttactctttgctgtggttgttgatgtgggctacggttattggtttgttggttcagttgttgtcggctagacttggtgtagcgacggggagacacttagctgagctttgtagggaagagtatccgacttgggctaggatggttttgtgggtaatggcgga

SEQ ID NO: 14528 - DNA, 534 bp, Gossypium hirsutum
  Clone ID: LIB3829-034-Q1-K6-E7
gggaacctgactggatgggaggacaagtgcctagactcgaacgattcggttcttatcacttccttaattggtggtattattggtcactattcttgctgcaacggtgacacttggtcatcggagatcggagttcttagtgatgaccagccacggcttatcacaacttttaagtctgttcgaaggggcaccaatggaggtgtgacaaaaacaggacttttagcagctttggcagcagggagtgtcattggtttaacattttttctggttggatttctcactacaagatgttcaaatgaaatgggcatgaagcagctgttggtaatacccctttctgcagtggctgggcttttaggaagtatcatagattctctgttgggagcaacccttcaattcagtgggttctgctctgtccgaaataaggttgttggaaaacctggaccaacagtgaagaggatttcaggtcttaactttcttgacaacaatgcggtgaacctcgtctcgatactactgaccacactgctgacttcatttgcc

SEQ ID NO: 14529 - DNA, 392 bp, Gossypium hirsutum
  Clone ID: LIB3829-034-Q1-K6-E8
aagaagcacacgggacctggcatcctttccatggcgaacgctggacccggaacaaacggatctcaattcttcatctgcacgaccaagacggagtggctggacggaaagcacgtggtgttcggacaggtagttgaaggcatggatgtggttaaagcgattgagaaggtggggtctagcggtgggaggacttccaagcctgttgttattgctgactgtggacagctttgaaaaagggcttattgaattgtgtttccttcataatatctggtctttttaggctccttttttttatgctatgctgcttctatggctactgggttttggtgttttttaagaagttgcttgatgtagctttttcattaactgccataaataagataggctttattttc

SEQ ID NO: 14530 - DNA, 527 bp, Gossypium hirsutum
  Clone ID: LIB3829-034-Q1-K6-E9
ctttgaggttatggcagtagctatccttaaagtttcaacatggtttcgtatttttggtgttcgcttctccaataagtctttcatctatctagctggtcttcagctgcttctatcatcttggaaaagatctctcttgccagggatatgtggcatccttgctggttccttatatcgtctaaatgtcttccacatccgaaaggctaagttccctgagtttattacatcattcttttcgtgtgtttcttggccttctattgggaatccacctacaacaccagctaggaatcttgcaggaaatgtaccttcctacacaactcgccaagtggagagaacctatgcatccgcagttgcgtcttcagccatagagccatcggaggatgctgttgctacgctggtgtctatgggctttgatcagaactcagctaggcaggcacttgtgcatgctagaaatgacatcaatgctgccacaaacattcttcttgaagcacagtcccactaattgaaacatagaattgctggcgaaaaga

SEQ ID NO: 14531 - DNA, 520 bp, Gossypium hirsutum
  Clone ID: LIB3829-034-Q1-K6-F1
aaactaggccataaagagggggcacaaatattgaatacagcagagcaaaaccccgtacttcaactcctataacccttatgctctaaaccaacatttcttcttcatcttcatcttctctttgttttattttctctgtacttagaagggtattttcagttttcagttttcacttcaagttcctacctctcactttcttttcttgaagcttaacaacacagtagaaaaattttgttttgtttttttggctatggattttctcaggaatgtgtcagtctcgggtgaatatcatcaaccagagcaagtcctttcatcaccatgctctaaactgggcgcctctattgatgaccttttccctactcaaaatacggaagtggatgtgagtttggagtggttgtctatatttgtagaagactgtttatcaagcactggaaactgcatcccagttgctgccacagcagctccaaatgttaccacaactgcaacaacaacaacaaagcctacaaattcttcaaagaaacca

SEQ ID NO: 14532 - DNA, 524 bp, Gossypium hirsutum
  Clone ID: LIB3829-034-Q1-K6-F10
gtcactccctccaagaagctgctaagtctcctgtttcaaagacacaagtggtgggttggccgccggtgagaggctttgcaaagagaggaaagaagagttgcaaatatgtaaaagtggcggtggacggtgctccatatttaaggaaagttgatctcgagatatacaatagttatcagcagctgttaacctcccttgaagacatgttttcatgtttcaccataagaaactatttgaacgagaagaaaatagagcaagtgaatggaattgagtatatgcctacatatgaggataaggacggagattggatgttggtgggagatgtaccatggcaaatgtttgttgaatcttgcaaacgcttaaggttaatgaaaagttcagaggcagttggattaggtctaacgacaggtccaaaatactcaagcacaaattaaagaaagaagcctttttaattcaagcatccaagaaagaaatcataaagaattgtacagaggcttttttgctttgtttgaactatttttacctga

SEQ ID NO: 14533 - DNA, 528 bp, Gossypium hirsutum
  Clone ID: LIB3829-034-Q1-K6-F11
ttcctccattggaggagcttagggtttgttggtgttctgatctttgctctgtctgaaaaataaacagaattataaaccaacaccaacgccatgggaagatttgaagagggaggattcgattcagtggtttgccctaagcctatacgaacctttagatggtctaccaactgttatcagactgagatggctgattcaaaagctggtgcagagcttcttgatataatcctctccgagggagggtatggggccgagaaccccaccgaccaaatggcttcatcaccaccgtatttctgtggatcaccgccgagcagggcgtcgaatccggtaatccaagatgcccgattcaacgacgagcagccggtgctacctccactaacatccccgggaccctcctcaaggggaggatgcgtgagggtgaaattcgggcagatgccagctgctgtacgaatcgagggatttgattgcctcaccagagatggccgccatcgcagaatctccgccgtggcttaagaaataccgaggggaaga

SEQ ID NO: 14534 - DNA, 176 bp, Gossypium hirsutum
  unsure (1)..(176): unsure at all n locations; Clone ID: LIB3829-034-Q1-K6-F12
gggggccccccccccccccccccccccccaaagggggggggggggggggggggggggggcnacggcccgacccgcgcgggggggggagcgaagnnaannnngcgnaaagcgcccgcccccgccccaaaaaaacaaaagaagacccccccccggggggggggggggggggggggggg

SEQ ID NO: 14535 - DNA, 456 bp, Gossypium hirsutum
  Clone ID: LIB3829-034-Q1-K6-F2
attaactccgacgaggttcagtcggttgttaagccgattaagaaggagatcaagagggcacctttgaagaagaatccactcaagaacttgaatgctatgctgaagttgaacccttacgcaaagactgctagaaggatgtctcttttggctgaggcacagcgtgttaaggccaagaaggagaagcttgacaagaagaggaagcctatatctaaggaggaagcaaccgcaatcaagtcagctggcaaagcatggtatcaaactatgatctccgacagcgattacacagagttcgagaacttctccaagtggttgggtgtgtcgcagtaaattttagtttctgcggagtggttgtatcagttttgttttcggtgtttttgacatttttatttcatttgatgatgtttggagttttggaagtaaaattagtggaatggcatggaccctatttctcttttc

SEQ ID NO: 14536 - DNA, 522 bp, Gossypium hirsutum
  Clone ID: LIB3829-034-Q1-K6-F4
gggaagggctccataacagattagcaacaaatgtccaaaatcaagcagacagcaattctgcaaccacatctagcaatgtcatcaatgattctagacacgaacttccccaaacaaacatgtcaccagatgtccaaggagaaaacattgagcgtacacaacttaggagtttggaaagtggcatcgcagagttgcctaatcaaacaggagttctggttaggaacatggctgttgagagcataagttggcaagaaaatactacccaaggtgggaattggcgagaaccagctgcgaatgatgagagaggaaactggcaacaaccaacatatgctcagttcaacgaattgagagacaacagtacagaagtaatggatacaaattggcaagaaagttcagttagtgagcatcgtcaagaaaatcctggaaatgaaaatggagaagcaaatcgtccacagggagcccagagggtttggcatgagggtcgctctcaagaagctgttgataattggtcagaagggcgttctg

SEQ ID NO: 14537 - DNA, 525 bp, Gossypium hirsutum
  Clone ID: LIB3829-034-Q1-K6-F5
ctcagttcatcagcttgtggaaaatgctgatgagtgtatggttcttgataacgaagctctctacgatatctgtttccgtaccctcaagctcactactccaagttttggagatctcaaccatctaatttctgccaccatgagtggtgtaacatgctgccttcgcttccctggtcagcttaactcagatctccgcaaacttgctgtaaaccttattccattccctcgactacatttcttcatggtgggatttgcgcctctcacctcacgcggttcccaacagtacagagccctcactgtccctgaacttacacagcaaatgtgggatgccaagaacatgatgtgtgcagctgatcctcgacacggtcgatacctcacagcatcagcggtcttccgtgggaagatgagcacgaaagaggttgatgagcagatgatcaatgtgcaaaacaagaactcatcttactttgttgaatggatcccgaacaatgtgaagtccactgtttgtgacatccctccaatcggcttaaa

SEQ ID NO: 14538 - DNA, 523 bp, Gossypium hirsutum
  Clone ID: LIB3829-034-Q1-K6-F7
ccctccctcacttccttcttacccacagctaattattaatgccatagaagcattaaacgacaaggatggttcaaacaagacctcaatatccaaatacatagagtccaagtacggagatttggctgctggccattccactctcctttctcaccaccttaatataatgaaagaaagtggggaacttgtgttttggaaaaacaattacatgaaagctgatccgagcgctccaccaaggcgtggccgtggtaggcctccaaaacccaaggtcccattgccacctggtatggttttaagctctgcaaggcctaggggccgccctcctaagaaccccaacgctccccttaggttccccaagccttctgggagtgggaaaccacgtggaaggccaaggaagatggctcgacccgaagggggaatagctgccagctccacaactatgatgtcggcctccgttaggcctaggggacgtccgcctaaggtgaagacttccgcattcactgaagtcagtgttggacattaaaca

SEQ ID NO: 14539 - DNA, 526 bp, Gossypium hirsutum
  Clone ID: LIB3829-034-Q1-K6-F8
tgccaaaaaggtgaggagccaaaaggatgttatcgaattgtctcttaacatcaccaccactgctgtcgaacacaattacttcaagattaagaagctgttggctcgaaaggacttgacgacgcgtgaaaagacggctctccatgattgtttggagactattgacgagaccctcgacgagctccacgaagctgttgaggatcttcatgagtaccccaacaagaaatctttgacccagcacgcggatgacctcaagaccctgatgagtgccgcaatgaccaaccaggaaacttgcttggacgggttttctcacgagggtgccgacaagaaaatccgtgaggtcctgatcgatggcgagaagtacgtcgaaaagatgtgcagtaatgcgcttgccatgatcaagaacatgacggacactgatatagcaaacgagatgatgctcaagtcatcgaacaggaagctgaaggaggacgaaagcggcattgcctggccagagtggttgtccgctggcgacaggcgcctgcttcag

SEQ ID NO: 14540 - DNA, 531 bp, Gossypium hirsutum
  Clone ID: LIB3829-034-Q1-K6-G1
cagagggcaaagggaaaaggcgacaagggagtagacttgttagatataacaagataacaaaaccttcgagtcaccactcaccacccaccaggcccagctttcttatctttaccggaaaacatcatcatggattccaatccccaatcttgtgaaaaccctgaaatcaaatcaaccgaggtgcaaacccaaaaccaaaatcaagtttctcaatccccatttgctactgcatctctttctttatcttccttgcccccaaccctacctactcagttcttcatccaacccaaaatcttatctttattctctgctcaatgtccctccaaagttaaagttccaactcaagcttcctctctttctcatctctccctttcttcaacttccccttccccttccaaactttccttcaaatccacctttgccaataaccctctccagtcccctctctccttaggtccgggccgccatctcgacccctccaatggcgccgcaattcgtcgagcttccatcgtttggttccgcaacgatttacgg

SEQ ID NO: 14541 - DNA, 531 bp, Gossypium hirsutum
  Clone ID: LIB3829-034-Q1-K6-G10
ggaagatggtgatgaaaatgaagaggataaaaatgattccggatctgagaaaagacctggttttgatcattttaatagcgaggagagcaatcctataaaatctaatgccatgagaagttctctttgggaaatagacacccttcgacaccattactgcccacctgtatcaagtttgttttgtcattggagaatgatttgacagttcgatccaaaaccactgaaatggacatcaaagattttagttctggttcatatgcaacaatatttggggacgagatacgacgtcgggtaaagcaggttcctttggctttttataaagcaacgccaacatctttgtttcccgagtctgacttttgtggttggaccttgaaatacgaaggaagcaatgaaattaaggagcagaaaacagttgaagaagatgatgcctctacaaaacgacagcggatcgaatgctgatgttcttgacttgtttcttagggaggatcgtaattcatatatagttttgaccaacttggacactttttttttttt

SEQ ID NO: 14542 - DNA, 455 bp, Gossypium hirsutum
  Clone ID: LIB3829-034-Q1-K6-G11
atcgccgccggcgacatcatcctcgtcggccttagggattatcaagatgacaaggctgacgtcatcttgaaatacatgcccgatgaagctaggcttctcaaagcttatggtgagctacccgagaataccaggttgaatgaagggattgctggcggcattgatgaggaagatgatggtgcaggcgatgactacatcgagttcgaggatgaggacatcgataagatttaaatttctcttcttcttttttgtcatttttgaatttattttaagatatggtggtgatatttgccgtatggtcatgctttattaagcacaatggatgctggatttatgttattacacatggatttaccttttattatgttaatggcattgttttctctttaaatttgacatgggttttcatattttgtcctcatttctgaatattgcaatttagtatgggttgatttttg

SEQ ID NO: 14543 - DNA, 525 bp, Gossypium hirsutum
  Clone ID: LIB3829-034-Q1-K6-G12
gaagatttagaggttcacaagaggatgaaagctattggtgaccttatacaacttcattcccctgatatcatttgttttcaagaggttactccgatgatttatgacatttttcgtgggtctaattggtggaaagggtaccggtgctctatctcggacaacacggcgagtttgagagcttacttttgtatacagttaagcaaattgcctgtgaaatcctttcgtcgtgaaccttttgataattcgataatggggcgagaactttgcatgactgaggttgaagtttctgggggtgaaacaacgcttgttgttgctactacccatctcgagagtccgtgtcctgctccgccgaaatgggatcaaatgtatagtaaggaacgtgtagaacaagcgaaagtagcgatcaatattctcgagaataacccgaatgttatttttgggggtgatatgaattgggatgacaaattagatggtcgatttcctttaactgatggatggattgatgcttggaacgagttaaggcctgct

SEQ ID NO: 14544 - DNA, 524 bp, Gossypium hirsutum
  Clone ID: LIB3829-034-Q1-K6-G2
ctttgctttcgatctgagaatttgccaagagaaatcaaatcctatatcttcaatttctgatagaaaattcacgccacgaggcataggtcattgacaaatttgcaagtacttgaatttgtgtgaaggaaagatgcaaaatcaggatggagcggtagctgatagggaaaaggaatctgctgtatccattcccatttctgaagttgatgactgggcaaacttcgcagatgatgatatcatgcagcaacaatctgccattaatgctgaggaggccaagaaaattccatttgttggtgacaaggaaccactctctatgttggcagctgaatatgaatcaggaagtcctatattgctagaaaaaataaaggtgcttgatcagcaatatgctgccattagaagaacgcgaggagatggaaactgctttttccggagttttatgttttcataccttgaacatattttggaatctcaagaccgtgctgaggttgatcgtatcaaaggcaatgttgaagaatgtagaaagacgc

SEQ ID NO: 14545 - DNA, 494 bp, Gossypium hirsutum
  Clone ID: LIB3829-034-Q1-K6-G3
gcggtgagtggtctgccaagcagttggagggagagattgagagctctgctgcttccacttacgagctccagcggaaacttgtccaggccgccaccgcctgcgactcctctggtggtgtcacctcctctttctctgtcgttacccctaattctgccgttttccaggtggttattggaggtgctgtaggcggagccttcatcgggggtggaggagctgctgccgctccggctggaggcgctgccgctgccgctgaagctcctgcagctgaggagaaaaaggaagagaaagaggagagtgatgacgatatgggattctctctctttgattaagctcctttactgccttactgcctgtttagatcttagcaagttgttacattttcatttttcatttatgcgtgaattagactatcttgggtgacattgggctcttttcctagttaggagaagccatttttcaggataaaattgacaatattatgagtatgttttttg

SEQ ID NO: 14546 - DNA, 532 bp, Gossypium hirsutum
  Clone ID: LIB3829-034-Q1-K6-G4
attgcgttgcaacttacctgagggaaaagcaaagcctcatgaagcttattgagggtattccggggcgagtttgtcttacactagacatgtggacttcaaatcaaacactcggttatgtgtttataactggacacttcattgattttgaatggaagttgcaaagtcgggttctcaatgtcataatggaaccatatcccgattccgattctgctctaagtcatgctgttgctgcctgcctgtcagactggagtttggaaggcaagttattttccctcaccttcaatcatccaacaagtgaagctgggctggaaaatcttagacctctactctgtactaagaatccccttattcttaacggtcagttgttacttggaaattgcatagctcgtaccctgagcagcatggcaaaggatgtgcttggtgcagggcatgaggttgtcaagaaaatccgtgatagtgtaaagtatgtgaagacttcagaatcccatgatgaaaagtttgttcaagttaaaaaccagcttcaagtgccaag

SEQ ID NO: 14547 - DNA, 517 bp, Gossypium hirsutum
  Clone ID: LIB3829-034-Q1-K6-G5
attttattgggttgtggagaaacagaaagaaacgagttgctgaggagaatcagccaggatgttccggaggcagccgcgaccgatcttttgtttcgtgctgcatctgaagaagcagcaatattcgatgtcgatatagatcataacttagtcgccgggctaatgacccacatttatcgaaccgaccctgttaagaaagaattgctggagaggactaaaaggcccaagtttggaccggatgcttctaaagcggtggtagcgaagctaattgacggatacctagctgaaatggctcgagatccgtatttaccgggtgcaaatagccgttaaccttgctgaaatatgatcaagcgtctcgagaccttgtcatgacggactttaccgtggcatagacatgtatctgaaggaacaccggggaatcagcataagtgagagaaagagaatatgcaggctaatggactgcaagaagctatcggctgaggcctgcatgcatgctgcgcaaaacgagaggctgccatta

SEQ ID NO: 14548 - DNA, 527 bp, Gossypium hirsutum
  Clone ID: LIB3829-034-Q1-K6-G6
cttcgcttctctcaaaaactcccctcttatctttcttcatcttcgatatcaaatttcataaatactaaaaggaaataagaaatagaaagtgggttttcgaagatgttgcaagatgtgtggaacgctcctcctggattcaggccttgtaaatcggcccccacttctccggcgaagcccctcggggttctgagaactcgctccgagtccttccatgccatccacaaagtcccagtcggtgacactccttatgttagagccaagaacgttcaattggtggaaaaagatccggagagggcgattcctttattttgggcagccataaatgcaggggatagagttgatagtgctttgaaagacatggccattgtaatgaagcagcaaaatcgagcagaggaagccattgaagctatcaagtctctgcgtagtagatgctcagatcaagcgcaggagtctcttgataacattctattggatctctacaagagatgtggaaggttggatgaccaaatagcattgttgaagcacaa

SEQ ID NO: 14549 - DNA, 532 bp, Gossypium hirsutum
  Clone ID: LIB3829-034-Q1-K6-G7
cggacgcgtgggcggacgcgtgggcggacgcgtgggcggacgcgtgggcggacgcgtgggctagacaggcatgccaaggtaactaagaaaggcctacataaatgatgcaagtaagaagttggcacgaccatattgtaatgccgattagacaagatcagaatcaagtgtgggcgttaataaacccgttttgagggacagagcaatgataccacatgataattaggtaccaacgtcgatctgcgaagagcttcaaatactagtctcaactgtcaactgatcaatgagagtgacaatgaagatggaaaaaagggagacaccgtgtctatctctaatatcgaacaaggaattaatagcttagaaaaactagtccaatcagatcatattagcaatgatattgttaattctcacgtggaaattgtggggtttgtacgcaagggaggaaagggaatggcttcaaaaatgtttcagggagataaaaatactaaatttttccatcagttagaagagttaggaataaagttggtgagtgtgc

SEQ ID NO: 14550 - DNA, 522 bp, Gossypium hirsutum
  Clone ID: LIB3829-034-Q1-K6-G8
ggaacattggttgtgcattaatggattcccagcgacaaccattcatggtgataggactcagcaggaaagggaactggcattaagatctttcaagactggaaagaccccaattttggtagcaactgatgtggctgctcgtggtcttgatataccccatgtagctcatgtgatcaactttgatcttcccaatgatattgatgattatgtccatcggattggaaggacagggcgtgctggtaaatcaggattggctacagctttctttaatgagggcaatttgtccctggcgaggcctctagctgagctgatgcaagaagcaagtcaagaggtacctgcttggctcacccgttatgcatcccgagctccttatggaggtagcaaaggtcgacgatctgggggagggcgttttggtgggcgtgatttcagaagggaaagttcatttggtaagaatctggattactacggtggaggagggaatagtggtagtggatatggagttccttctagcaattatggtggagg

SEQ ID NO: 14551 - DNA, 526 bp, Gossypium hirsutum
  Clone ID: LIB3829-034-Q1-K6-G9
gctggctccagttccttggataaagaacaagcttcagaagtttcggaagaatgatatgctccagttggtcccagaaaatactgaagagtacccattggaaaatcagaacctgaataatttgcggagaccgctgatgcccagaaagtttatttgactctcctaggatgggtgacattgacattccgggacaggatctttccgtctatcctatcagcagccggacctcacctatacccaagcagaaatttgactttgcgcagtattatgcatttaatttgacaatatttgccctgaccttgatatattcttcatttgcaccactcgtggtgccagtgggtgcagtttattttggatataggtatgtggttgataagtacaactttctgtttgtgtatagagtccggggatttcctgctggcaatgatggaaggctgatggatactgtgttgagtatcatgcggttctgcctcgacttgttcctcatctcgatgcttttgttcttttcagtcaaaggagactccacaaa

SEQ ID NO: 14552 - DNA, 491 bp, Gossypium hirsutum
  Clone ID: LIB3829-034-Q1-K6-H1
gagaaaagaaacagaaaaaaaatgggttctttcttttcatccgattcaacgccagaaaagccatcatcttcatctgagccttcaagcgtcctaacctttcattcatcacccagatggcaacttcacttcaactctgtcaaagaaacctcacagcttatggttatagatttctcagcttcttggtgtgggccatgtaaattcatggaacctgttttgaatggcatggctgctaagtttactgaagttcagtttgtaaaacttgatgttgatgaactgcctgatgtggcgcaggaatttggggttcaaggaatgccaactttcgtgttgctaaagaaagggaaggaagtggatagggtggttggagcccaaaagaatgatcttgagaagaaaattgagaaacacagggatctggtagctgctacttgaactttcagcttgtattttctccattaataatgtctaatgggatttccctgaatttgattatgttt

SEQ ID NO: 14553 - DNA, 521 bp, Gossypium hirsutum
  Clone ID: LIB3829-034-Q1-K6-H10
cgatccgtttcctttactgttctgaggcttcctttctccactcttcctctcctgaaaacttctaatctggtcctcttctcctatcgtaccgagcttgatccatagcatactcaggaactcccctatccaggtaaatttcttctcctctttttaacgtttctgttgctaagatatgtgcaagattatttgcagacctaggtgtatgttgaaatctgatattatcaaatccatatattttctgttgaatgttataaatgtatgcccctaccatcgatctgtcttgaccctttgaattgcatttttgatgattgcgagggaatctccttcaagaatcagaaactgccatcccttcccggttcctatttggactgctctccagcaggttattgcttcagcagcaaaggccgatgagatattagaatgaatctctgaacatgagaagaggatatttcgttccgaatctctggccacaatacccgaagccgaccgattctggcttttatcgtaggcaccatcaaagc

SEQ ID NO: 14554 - DNA, 523 bp, Gossypium hirsutum
  Clone ID: LIB3829-034-Q1-K6-H11
aaaaaaacaggtgaaaccccgttttcttttggtctcaaaacgattcaaaagggcaagattcttggttttagggtttgggttttcattgatttttagtgaaaaaattataaaaaaattatgggaagaggtagggttgaacttaagaggattgaaaacaagatcaacaggcaagtcacttttgcaaagagaagaaatggtcttttgaagaaagcttatgagctttccgttctttgtgatgctgaagttgctctcatcatcttctccaatagaggaaagttgtacgaattttgcagcagctcaagcatgatcaaaacattggagaggtaccaaaaatgcaactatggagctcctgagccaaatgtgtcatcgagggaggctgctttggaattaagcagtcggcaggaatatttgaagcttaaagcacgttacgatgccttacaaaggtcccaaaggaatttactgggagaagatttgggacctttgagcagcaaggaactcgagtcacttgagaaacagcttgatt

SEQ ID NO: 14555 - DNA, 504 bp, Gossypium hirsutum
  Clone ID: LIB3829-034-Q1-K6-H2
aaaaaagaaagaaaaattacagcgaatatggcagcccttaaagttccagctcatgtacctgccccttctgaggatgctgatcaacttgccaaagcttttgaaggatggggtacaaatgagcaattgattatcgacattacggctcacaggaatgcagctcagcgcaatctgattcgtaaaacttatcgggaagcttatggggaagatctccttaagtctttggatgaggaactttcaagtgactttgagcgatctgtggtgctgtttactttggaccctgcagagcgggatgcatttctggcctcatgaagctacaatgaggttcacatcaagccattgagctctcatggaaattgctcgcactaggtcttcacatgaactgttcaatgcgaggaaggcgtatcacgatctttacaagacataccttgaataagatgttgcgcaccataccaagggagactaccgaaagcttttggtcccactggttagcgcattcacgatacc

SEQ ID NO: 14556 - DNA, 519 bp, Gossypium hirsutum
  Clone ID: LIB3829-034-Q1-K6-H4
ggctgacagggctaccattgctaatatgtctcctgagtatggtgcaaccatgggattcttccctgtagatcatgttactttgcagtatctgaaattgactggccgaagtgacgaaactgtggcaatgatagaatcatatctccgtgcaaataaaatgttcgtcgactacaatgagccccaacaagaaagagtgtactcatcatatctagaattaaaccttgctgaagttgaaccctgtatatctggaccaaagagaccacatgatcgggttcctttgagagaaatgaagagtgattggaattcttgtcttaataataaagctggtttcaagggctttgctgtgccaaaagaggcacaggacaaagtggcaaaattttcgttccacggacagccagcagagctcaggcatggcagtgttgtaattgctgctattacgagctgcaccaatacatcaaatcctagtgtcatgcttggggcaggacttgttgcaaaaaaggcttgtgaacttggtttacaggt

SEQ ID NO: 14557 - DNA, 521 bp, Gossypium hirsutum
  Clone ID: LIB3829-034-Q1-K6-H5
gcctgttattgctcagagagttatccaagaaagcaagtcattgttggaaaaccagaatttggtatcaaagatgttgacttcccgtcagtctagtaaaaagaactctgcttcagacggtgctagaccaagacaaggacaacatatccggccacccaaacctacaagtgagctcagaaagaaagtggagaaacttaaggttgcaagagattactcatttcttgaagatgacagaggggttccagcgcctgcaaaagagcctccacctcgaaatgtttctgctccaacctctgatgcgcgatctgctcaaatgtttccaaaaagcaaacaagctttgagcagcaacagcaatagtggcagaaattcccaaggcatccgtgatgaaaggaaatcagttccattgaagggtcaattgcaatctaaagctggtacccttaagtcttctaccattaaaccaaatgggatgccaatggattctagaaagcagcatggtgttagcaatggtatggggccaggccggcctg

SEQ ID NO: 14558 - DNA, 519 bp, Gossypium hirsutum
  Clone ID: LIB3829-034-Q1-K6-H7
gtgatatgggaatatgggacaaaagctagcttcattgctggcagaggtaccctagcatgcgtgttaattaatggtgttgttgttttggttacggccaccatgtaacatagacggacaaggcttcactgcttgcggaagtgatccaacacgtgaaagagcttaaacggcaaacgtgtttgatagcagaaacaagtccggtaccgaccgaaaccgatgaactaacggtggatacatcggaccaagatggtaagttcgtgataaaagcttcgctttgctgtgaagataggtccgatcttttgcctgacctaatcaaagcattgaaagatttacgtctcaaaacactgaaagctgagatcacgacgctgggcgggcgtgtcaagaatgtactcttcattaccggagaggaacaagaatcgagctgtagcagtgatggtggtgacgttattggttcaatacaagaagcattgaaagcggtgatggagaagagtacttgtggggatgaatctaattcttcaggga

SEQ ID NO: 14559 - DNA, 521 bp, Gossypium hirsutum
  Clone ID: LIB3829-034-Q1-K6-H8
tgattttctgcttccccttcccccatccttgacacctgatcttctgctagaagtcgctcgagctactctaaatcctcaggccgtttaccttatggtggcaactcatttaattcctacgatggtcataatcgtaacatgggagcttatagaactgagggatgggatactgagagacggggatctgatttgcaatctggcaatcagtttgaataccatgccttccctcaaacgttagataagttggagttggaatttaagagagaggcaacggaacttggaagaattcgtgataaggaagaagatgaagagaattataagcatcgggaggtaagatgtttatcttgtttgacaatcgtgtgtgcttttggtgctaaatggtttctttgacaagcctatatccttctgagataaggtaaatttttttataacttagttatcaatgttggattgtaactttttgtattgttaattaactacaatgaacaccatgaagttcaaaaatctaaagccggaaacagatg

SEQ ID NO: 14560 - DNA, 526 bp, Gossypium hirsutum
  Clone ID: LIB3829-034-Q1-N6-A1
gcttaaagaagagatggtatgggatttcgtaatttgaatctttttaatattgctttacttgccaaacagggttggcgattattatgtaatcctaactctttactagcgcgtacattgaaagctaaatattttaaagattcagatttcctgaattccaggttaggaaatttaccttctcttacctggcagagcatttgggctgctaaaggacttcttcaaaagggctagggctggagaattggggacgggaagagtgtctctatctggggagacccgtgggtacctttgaggaaatggatgtggaaaggattctatatgtcccactgtctatgcatccgcatgatgatctcttagtatggactggcgagccgactggagaatatactgtccggagtggacataaatgccttttacataatggacagactctaatacaaccagaatacaaaaatttttacaagagattgtggacccttgatcttcctccaaagattaaaattacaaactggaggattgctagtaatta

SEQ ID NO: 14561 - DNA, 275 bp, Gossypium hirsutum
  Clone ID: LIB3829-034-Q1-N6-A3
atggaaagggctaacagcagcaacttctcatataagttcacatccattttacaataattaagttatcaaagaactcaggcaaaaggaaaatccattactagtttaagacttaacaacaaattcagaccctcaaactctctgtcaatgtcctttgcacacgtcctacttgtactttgttgaatcccaaatccgatgatctataattgattcgatcaacgaaaaccataacaaattagagtcaacaaaacattaccataaacttacctgaatttccc

SEQ ID NO: 14562 - DNA, 492 bp, Gossypium hirsutum
  Clone ID: LIB3829-034-Q1-N6-A4
gccaggacatattagtgatagggcattgttccattgagtttttaatgaacataactattaaatagaaactacatatcattttcatttattttttaagcactattcttttcacatgtctaggctttcattcacagagaatgaagcattacctgaattccatgttggggttgaagcaaaaaagggtaaatggggagtggctgtaggtaggaaaaagaaaaaggggaagcgttgtaaaatcatcgaaagagccatcttcatttccatcaacgcaaagctcattcccacacaagatcgagggcccaacccgaacggaataaatgcagctgaattatgtttcgtagcattggcaatcccttttgcaaacctttcgggtttgaaaacatttacatcatctccccataagtgagggtcatggggaaatacaaaatttgggacaagcaactccaaataagctggtaaaatcagctttcccaattgaacgtcagttactac

SEQ ID NO: 14563 - DNA, 353 bp, Gossypium hirsutum
  Clone ID: LIB3829-034-Q1-N6-A5
tttttattctagatctcattgaaaactactattaaagaggaaaaaagaaagagactaaccaagggccgcccccctttcgttttctttcgaactgtaactgcccttcttaagcacgctatatgtcgcggaccccatatttgcccgggccaaatcgagactccaatcaatcaaagcaattgaaacccgacccactgttcgtttcacaaatactgacccccaagcgcaacaccccccccatttcttttacattagcccaacgtcggatggcccaactgcagaaaaccttgcttcccttgtttcccttgcactcccacccggtccaaactggaccccgcgctcgtccactcacccgc

SEQ ID NO: 14564 - DNA, 535 bp, Gossypium hirsutum
  Clone ID: LIB3829-034-Q1-N6-A6
attgaaatgaaaaagcatttctcgggaaacagtaaacatgttaatagtacagaaaatccagtttaaggtactggtgtgaatcaaatcatgaattattccttgaaaattagtattttattttctttataaaactcttattatgcaacagatcctaaaccttccattcccaagcaacagctactgcaagtactctcaaagcttccaaccgaaaaccttaggcattcttcttcacctcagcagattttatgatatcaatgaactccggcttaagtgaagctccaccgaccaagaaaccatcaacatcaggctgagctgctagttccttgcagtttgcagcagtgacggaccctccataaataatccgggttgatgcagcaacttcgggactaacattagcctgaagccatttcctcaactcacaatgtacttcctgagcttgagctggagtagcaaccttcccggttccaatagcccacacaggctcatatgccaaaacgacatcagtccagtttgatatttttgctgcaattgcttt

SEQ ID NO: 14565 - DNA, 448 bp, Gossypium hirsutum
  unsure (1)..(448): unsure at all n locations; Clone ID: LIB3829-034-Q1-N6-B1
aattaaattaatatttagaaggaannnatttttttttggggtaaaaaagaaaaaaaaaagaaaaggggaaatggtaaaaaaggggggggaagaaaaaaaaaaaaaaagggagggaaaaaagggagagaagggaagggggggaaaaaaaaaaaggaaaggaaaaaaaagaagaaaaaaaaaaaaaaggaaaaaaaaaaaaagaggaaaaaaaaaaaaagaaaaaaacgggagggggaagcagagaaaaagaaaaagggaaaaaagggagaacaaggaaaggaaagagagaggagggaaaaagggggaaaaaaaaaaaaaaaaaaagggaacaagaaaaaaagagaaaaacgggaaaaaatgaagaaaagggaaaagccgggaagaaaaaaagagaaagcaaaggaaaagaaaagagggaaggaaaaaaaaaaaaaagggaggaagaaaa

SEQ ID NO: 14566 - DNA, 516 bp, Gossypium hirsutum
  Clone ID: LIB3829-034-Q1-N6-B2
gttaagaggggctcgagaagcaaaacaatgaggagttttcttggtacaattggtaggacaccaaatgctgctttagcgcttcagttgttatgtagggcagtatgctgcagctgtcttttagattagatgttggttttgggcatttgttgcatgtttaaaggtgaagcattgtattttttttttaaatattttttttttgacaactaatctgattaaaaaaaaaaaaaaaaaaaaaaaaaaaaaaaaaaaaaaaaaaaaaaaaaaaaaaaaaaaaaaaaaaaaaaaaaaaaaaaaaaaaaaaaaaaaaaaaaaaaaaaaaaaaaaaaaaaaaaaaaggggggggccccccctttttttttttttttttaaaaagggtttttttttttaaaaaaaaaaattttttaaaaaaaaaaaagggtttttttttttttttttgccccaaaaaacacccttttgggaaaataaaaaagaaaaacacccccccttttttttaaaaaaaaattgcgaaaatttttt

SEQ ID NO: 14567 - DNA, 478 bp, Gossypium hirsutum
  Clone ID: LIB3829-034-Q1-N6-B3
atgttaaagtcattttacattgacaaatcaataatttccaaataaaggaggaaagaaatcattgaaccaaagtatcaaaaattacaaccgagtaacaaagggaagttcaaatcttcaaacagatcgaaactcggaacatctctcactttttttgcagacaccagatttagcatgctggaacttcaacataatttctaataaaaatgccttcaaactgatagaaccatatgtacttaatctaaataataataataattacaggaaaggaaaggactcatcatcaatgcctactagtccctggtggtaagttatgagattggacaaattggttaaaattctttctaagcattttagtcccttgaagtccatgactctgcttcataatgatagccataaaggttataatcatactggggcggaatgccatggtgatagatatcttggggtggaaaggtggtgggctgatgatagctatggt

SEQ ID NO: 14568 - DNA, 514 bp, Gossypium hirsutum
  Clone ID: LIB3829-034-Q1-N6-B4
aatgagagaactggaagtgagatttcataaacaataaattttccgcagatgatggctggaaaaatccttcgtatccctttagcacgcacacctcacgaagatttcttggtctggtgaggtgagtattcaggtgagttttcggttcgcagtgcctataaactattacaataaactattacaagctttggaggaaattcctagagcttacactttacaaacaggctatatgaacttttacaaaaaactatggctccttaatctaccaagcaaaattaaggttacaatatggagaatctcatggaattatttgtcgacaagggttaatatgcagtagcattagctcgtcagtaacacaaactgccctcggtgcggtgaaagtgctgaaacaatcgaccatatttttcgcaaatgtccataaatctgcctcaggggttgtggtcagagacgaggaaaggcttgtccttctttcctactcagagatcaaccacggggtatcttccgcatttgcagccga

SEQ ID NO: 14569 - DNA, 516 bp, Gossypium hirsutum
  Clone ID: LIB3829-034-Q1-N6-B5
gaccaactctggattttacataaaagaacagaagtaaatattttacatacaaaacaagatcaagcatcgaattgagtatcatcaaattaaaaccagaaagccaagttggagaatctcagaaaaataaaatgcatagccataactttaaataagcactcgatgcagtgctcgttcaacaacaacaaaagaacatttgcaatgagtaaaagtataccttaatcaggcaatgcggttcctcgttcgagattatttttgatttccaatgtgtatttcccgaaggcccgttcgatcttcttattgaaatgctcgttacggtcattgatcgaatcgatatccttctcatcgtgaaatttcctcctcctactaaatgacttgcgtttttcttcccggtccttaagttcctttaccatcttatcaatcttatcttccgaaaccttaggtgccttcccatattggaggctcgaagcttcacggaagaactccgggtcagattctttcattttgttatattcttct

SEQ ID NO: 14570 - DNA, 485 bp, Gossypium hirsutum
  unsure (1)..(485): unsure at all n locations; Clone ID: LIB3829-034-Q1-N6-B6
ccataatgctatataggnaaatcaattccattaacagtcaacatcaatgccaaatatataagcaagccgagggtttgttgaactttaaaaacacgaaacgaagactggaaaccaaagatcaaattccccgatcaacagattaacactaactttaacctccacggtagatcatctcaccgtctttattatattatttcttgtttttacttccaccagcaccgccggcagtgttacctccagctgccgcctgcgctgccttctttgcggccttttcttgtaaggcctttgcatctctttcacggcgttgttcaggggtcaatccatcgtccttggaaccagctttccctttgttgcctgacctggattgagccctttctctatctttttctctctggttgccgcgagtcattgttgatattctcgggaaccaaacaaagattaagcccgttgacggcaggaaaagaggaattttttctcgactcctg

SEQ ID NO: 14571 - DNA, 276 bp, Gossypium hirsutum
  Clone ID: LIB3829-034-Q1-N6-C1
cgcgggccggggccggcccgggaaccccggaccggcacggggaggcgaaccagggctccctaaagggaggggcaaaggaggggggggaatggagggggaaagcggtttccgggggagaaaagagacccgcgcaaaacgccaaaaaaaaagcgagccgaaagcaagaagggaaaaaccggggaggcaaaaggagggacgcaccgcacactaacgggaaggcaaacagggcccgctttccaaaggaaaaaccagtcaacccagcggggaaaaggaagt

SEQ ID NO: 14572 - DNA, 532 bp, Gossypium hirsutum
  Clone ID: LIB3829-034-Q1-N6-C2
ctattaagtttagcctacttgcacttagtaatcaaattatagaactgaaccaattgatgctcatctccaaaacatatttgaccatgatcgggtctgtgtttccacaccatgaaaactaaaatatcaatacataaaagctttatgaagagattgattttatcaaacaatgcgtgcatgcatggatgttacaaattaatacccaacaaagctaaatgcaagttcatattttcgaaagacttgttaaatcaaatcatccttggctttgcaacaatggttgaatgcttcagaatatgcagactgaactgtccacctttctccgatgtatcaagcttagactgcccctttggaggcaatagctcaaaattctgcaccaaacgtcccaatgtgatccctaggattggcagtgccaaaataatccctggacagctcctccttccaacaccaaatggaagatacctgaagtcattcccatttgcttctaccttcgattcctcctcgaaaaactttcgggccggaactcttctgggttctt

SEQ ID NO: 14573 - DNA, 546 bp, Gossypium hirsutum
  Clone ID: LIB3829-034-Q1-N6-C3
agaatcccacttgatcttaccaccatttcatttacatgacagtgaaagctaaagtccacgctgacagttccattgttccaatacaatttttaaattagacaaaatgtcaatttagatttggtcatcaagtaaaatatggctacctagtacaaaggtatttcggtgctaagaaattatcatattatatatccatctgatagcgaccaacaaaacctaccacgattgctgaaaccggggtatgtattcttgcaatctgctgcctgccaccactaaagcttatctgtcatgtagaaatgctgcagctatggtttgtcatcatatacaaggtgatgcctaataacccttctttgttcgtccaactgataatgagctctaaattcggagctagaaaagaaggcctccaaattagtgatttcatattcttcagccttggcttgtagatctgccattttcacatcaacatgggtaagccctgaagttgatccagaaagtatttcttcaaagcgcactgcattattcacaagctccctaagaagtacaaggaga

SEQ ID NO: 14574 - DNA, 514 bp, Gossypium hirsutum
  Clone ID: LIB3829-034-Q1-N6-C4
atgtaagcccatccattacaattgatcaatgagagtacatcagccaacatccaagataacaacaacttatttcctccatttaaacacaattcccaacaaaattaaggatacaactacttgtctgtttcttaaaaaagcttcaacttactctaatgccaacctaccactgtgtttgctacttcaaattattaaaacctattcttgtgtgtgttacatgctgcgatttctcgcaacaaatggaatggaagacactttgagtcatatttttaaaatgaaataagacaatcctagcagtaaaatattcttttgaatctttgagtaaatttgaaactcctcccccctctatcatctccctatccaaatggggaaggatataggaactaggggaaattaccattagcaagagtcgttgaacctcagtggcagagtggggcaccattccactgcacatgatgccagcaacatccatttcttagcaacccatcaccgcgcaattatacacaaagttacccga

SEQ ID NO: 14575 - DNA, 521 bp, Gossypium hirsutum
  Clone ID: LIB3829-034-Q1-N6-C5
gaggataaaattttgatttttactattaaatgctgtagtttgattaaataaaacacacatggccaatatatctttacgaccaggatatggtaaacaatcccccaacattgccacaaatccatgacaggaacatgcttctaccatagcaaagcttaataatgacccgctttttgcctcaactgcaatgcagtcgagcccagccaagcgaccatttatccgccattaatgcaacgcgatctatctcataagtaagctcttcaacaaaccctgtcaaataaaaaatatataacggccatcatcgagccttgcaaggctgcaatcatcattcaatctgcatacagaacctgaataaaagggtaaaattttcgatcctataatactctgaacaataaaaatgagttcttgattagaaaaaagaacttcagagcttatcgatcgagggaatatgatgaatcagattaggagacatcaaaactatcaagcttaggctagctatggagctttggcaacatgttccagct

SEQ ID NO: 14576 - DNA, 516 bp, Gossypium hirsutum
  Clone ID: LIB3829-034-Q1-N6-C6
aaagaaagaatccactaatttatatttattaaaagatctcgagtaaaaacgaggccaagaggggaaacagagacgcccaaatctaagttcaaccacccattattaattgtctgttaatcattgatcagatcgctatttgatataacaactccatgaattacgtgcatttaaaatggacggttatgcctgggtgctaccctggacagattatgggaaggctgctgtatcgatggaactaatgagggacatctgcgcccagaagcttgtcaaagacagtgcctgcttgtgagaaaacgaagattggattcttctgaggatcacacaaaagtgcgcatgatatcataacattctaccttataaatcaaaaatatgaggagaaggctcttgttattaagaattcacaggattggtgatgtaaaaccgattggcctgaacaatgatgctggaaaatatataaccaccagttagttggactggttaaacagttggaggtcatgatcccttgactgaacaatg

SEQ ID NO: 14577 - DNA, 482 bp, Gossypium hirsutum
  Clone ID: LIB3829-034-Q1-N6-D1
agaaaaggcactgacagccatgagcatcagtgaattgagagctctaaacaatcaactcatggaaaagaatgtgcatacttcttttatagaatctaatatattaatacataaacaaaaaaataactatcagcaaccaaaacttcattgaaaataaagccaagggtcaaaaagcaaacccaaacaagtccaacgatttgacacaaacaagtttcctcagaactaataaaccagataggtaacagagaaaagtaactgaactgattgctcattcttcctcttccccttcattctcagcaatattgaagtagcggagttcataaacattacggtccttgttggaagcaatcacccgaagccaatcccggacattgggcttcttcaagtacttcttagtcaagtatttaaggtaccgcttaaagaagttggagtcagaggtaaccgtgatacgggtcttgtcgcgggtgacagtgacggagtcacct

SEQ ID NO: 14578 - DNA, 515 bp, Gossypium hirsutum
  Clone ID: LIB3829-034-Q1-N6-D2
cagaaatatgagaaagaactagcataatttaaagagaaaacattaatacaagagataagtgctcaatgcaaagatataaccgtggtttacagtgaagaatcatacaaaaccattcaagctcaaggccagctccctcctcacactaacaagttgtctcattaatccaggctgcctcttgtatatacatgtctcacatgtcattctactcgtttagcaaccatgaaaattaacaactcttactccggtggcggcttcttcacgttcttgttattatgcatccaaaccttgaatacctgccttttcaccccatactcagcacaaaacttctgtacttcctcctcgtcttgtttattgatcctccaacccactttctcggctaactccaacatcttatccttctgctcctgcgtaaattttgtgcggaacctcttctttgacaacacataaggcggaggcggcggcactccgtcggcgttagattggaacacgttaagatcctcgcttgaaaactcgtt

SEQ ID NO: 14579 - DNA, 541 bp, Gossypium hirsutum
  Clone ID: LIB3829-034-Q1-N6-D3
gcaaccaaatgccaatttcaaatatgataatgaccattttaattacagtgagccagagaaatccctcctgaattaagaacatcaaacctatcctcaattctaggagaaaacaatccattgaggatagggcaaaactcatccaatgccattatcgatactgaaaacccatgtctggctcaagaccatacataccttggccttgactatggccaggtgcaccaaaagggcccatctgcttcgactttgacctgagttccatctcaataagcctctgcaatgcctccggatgatggctcccactgccgacatcattacctggaggcattccaagaccagcaaagttgggttggggctgccggtgaccatgccccaatggaaaaccatgcattggattcaattcaggtagcaaaccagccatctgattagttgaatgaggtgccagcagtggaacaccgggaattccacattgcatgattggaggaggaaagtttctgggtatatgcatttgttgtaacataggatgatgaatcggaggatcaaa

SEQ ID NO: 14580 - DNA, 476 bp, Gossypium hirsutum
  Clone ID: LIB3829-034-Q1-N6-D4
gaaatatccttcatattcctctcaatgggttggacatgaatacttcaaataaaattaaatagaaaaactacattacggccatttctgattctctcagctcaaacactaaagacagccatacttattacagaaccatgaagactacaaaatgaatataaaatttacccttgagggtttgtttccctggaaactttgcttgtatataaaagggccaaaatgtctttttttcttgggattccccccaagaaggggatcccattgataaagaaaaaagcaaattaatctaataccggttccagtaagtacggcgtctgaaccagttgtagtcacccaaatcttggataggacccatggcagcaatggcgatatccctgtcataaataaatcggtttgccacacgtttaacagtgctggggtcaacagcgtcgatcctagcaaataattcagcaaatgggattctcccaccgtatgtaaga

SEQ ID NO: 14581 - DNA, 484 bp, Gossypium hirsutum
  Clone ID: LIB3829-034-Q1-N6-D5
aagcaaaaaaaaaaccaacaccgaatcttattccgacaaacaacggccgaaccgtactattacaagctctatatacaccagactacattcttgcatacattaccccatactacactataagtttcacatttgaaagacctaagcatgcaaacagtaccaaaacccatttgatttgtcgccaaatatgggagaggactcatatctcacacgtcgtaaggaggacgagggctccttggtccaacctcgttagccttctcgtatgcatccgatgtggaccttctccgaaaccgatatgattctctgcctccggaaaaagagataccggaggggtcgatccggccggcgaaaccggaggcgatccgctctggtaaccaggcggttttacgatcataatactacgtgtcactctcgtcgcttcctccggcgcttcatcaccgtacgatcttacactcccgccatccgattccttggcagagttaggccg

SEQ ID NO: 14582 - DNA, 523 bp, Gossypium hirsutum
  Clone ID: LIB3829-034-Q1-N6-D6
agtaacaattaaggaagggattaaggggtgtaacattactaaaggaatagagtctcttaagaacagatgataataaacatggaaataaacaggtaataataattaagccaatgtaatgcgtattaactggaatcatttttagcttctaacagctaataaggaaggaatggcagccagattgggagttgtgtttttgttgtttgattctctaatgacgggggtagcatctttcttaccagaggatggtttggtgaatgctctcatggggcttgcaaatgcccatccccaactcctgctcctcccatggatcagcgctgctcctgttgctttcccattcccgttatgctcctccgctgatgacgataaccagtatgaagatgaggaggaggaagacgatgatgatgtgattatgaaaccaccgaatatgccaccgcattttaccctttctttcattgctgatgatgatgaggcggcgccgacggcggaggattttggtttgccttctctttgggattcaactcgt

SEQ ID NO: 14583 - DNA, 527 bp, Gossypium hirsutum
  Clone ID: LIB3829-034-Q1-N6-E1
gtaggacatgagggtgatagaaatcataatcaaaatagatgacaaacgccacacggttttgccttcatttgtagagcatgaagttattcgaatattatcacaatagcacaacagtcaaacaccataatcattggggaagcgtcaaagcgcttcacttgagcagccccttagacttcaaatattccacggtttggtcgtagatttcctcgatcccatacttaaagctgaatccttcgctaataagcttctctgaggaaatgatcaacttgggtttggaggggaaatctccaaaatcggtagggactttgaagtcagggtatcttttgttgaggaactttgctagttctggcacactggtattgacagcactgcatatatatcgacccgatgcagattctttttcagccagaaaaacatgggctcggcattcgtcttccacatgtgtgatagagatcgaacctgacagcatctgcattcctttcaaagcatttatgaggaattcattgcctgaaatcaaagatgtagca

SEQ ID NO: 14584 - DNA, 509 bp, Gossypium hirsutum
  Clone ID: LIB3829-034-Q1-N6-E2
agcaaaatatgagaactttacttacaaagaaaaaaaaaaaagactgacaagaaataccgggaagtgtttttttcactgctcccccaaaaaaagaaacggaatcctcgtctttctcttgtttttaacttgcggttccttcggttttcccgttaccttctatttcattctaatgggaaaccaagaaaatccttacatttaaaaccaaaaataaattttattgtagacctttgcggttgttataaccattataagataaataccatctaacaaacttcttcaacccggtttgcaaatcggttgagggcttgtacccgaattctttttgggccaaactgatattcgcatgagtgaatggaacgtcaccgtttccaggcatatctacgatattccttttggctttcaccttcaaatgtctttccaggatgttcaccagctccggcaccttgaccggcgacgtattccccaaattaaaaatcctatatggagcgttcccctttttcttcccacca

SEQ ID NO: 14585 - DNA, 558 bp, Gossypium hirsutum
  Clone ID: LIB3829-034-Q1-N6-E3
ccagacttgaactgtaaaagtttataccaaaaccaataggccacccgccataggctggcgtattcaaattcaaagcaacttatattattattcttttataagtttatgaaagagctactcttagccgcaaggaaatgtattccaagtcagtcgttgtaaatttattaaaatccaccgtataacccacaaggttcaatggatctccgcatataccaaacataacaaaaaaggtccagaaaaccttcttaacatggggacaaactacagatgaagctgtagtgcaaggcataccgcaataaggccgacagcaccaagacagttatatccgaggtagaagagtgagtggctcagctggaatatcagaacttgcctgtagatatcttgttaacaacgtagtagtactaaaattaaagccttcaacaggttcactttttgtacgtgatccattaagctgttttcggacttgagtagctagtgacttacccaactcaactccccactggtcaaaagaattgatgccccaaacaaaaccttcaacagcaactttatgttcatagc

SEQ ID NO: 14586 - DNA, 505 bp, Gossypium hirsutum
  Clone ID: LIB3829-034-Q1-N6-E4
aaagctcaaatatgatgcaagcattcattcacgtaagaagacaccttaagtagaagttgaacattttatcttatttcacattgctcactactcataaaaccatgcagagaaactgattctctttttaagttcttgacaacattactaacacccattagctgctataactatggatatatatcatactatctcctgacttttcaccctcaaaaaagcactactgacttcacgtatggcaggtcagtttgttttccgccggtcaagccaatggctatcgagagtagacaggtacttggacttggttgtctaaaaaaacaggttactaagctttatccatagttgccttctgattatgctcagggtgtggcaacattttccttggcaagaggagcaacctcctttccttcaatgccaggttcactgccagccaccccgaggctcaacaacattttctcccacaaccttgatggtcccttccatgaaaaatcttgtgccatacaattct

SEQ ID NO: 14587 - DNA, 461 bp, Gossypium hirsutum
  Clone ID: LIB3829-034-Q1-N6-E5
ccacaacatgacaacagaacaattgtattacattattgcaaaaaacagtacatgtgatggtattacagccagcaaaagcgtggtacaacctaacctgaagacgactttggactagaagtatcgacagaaaaactagttgtagaagttgaggaattatggacagctcttgcgtggctgatgcttggtttagtgaaccaagttgtttacagaaattgtttgtgaggccccacatggttgcatattagcctaatgttttgtctccctctcatccatctcagcacgatcttcatgtgcctcttgcttgtaagtcctctcagtccaacctcctgaactcataaacacatttctactccaatatgtcgagcacaggcaagtaaagcatgaaaaaaacaatatcgtatggaattcaagatcctaaaattatgcaacgataaaactgcactgcccttacttcactcttg

SEQ ID NO: 14588 - DNA, 561 bp, Gossypium hirsutum
  Clone ID: LIB3829-034-Q1-N6-E6
caaagctggttcacgtatatagctagcttgaaccaaattacagctgcattatttataataagaataagagttacatagttttggtaccttcaaatgttttcaaatgaatgtttagtgttgtagcattgagcaggatatgatcagtacattctttaacaccataacatggaacctacaagcatgtttttttaagacaatactccagaaaaatgcacagcttactaaactgaactttgtacataaaagtccctatatgagtatgcatttccaaaaaggaacatacgcttttaactggataaattcatctatgtaagcaaagtttgattgatcctaactcaataggctgatctcatggcttgagaacagtaagattgatcactcgattccctgcctattttgcgggtgacaagcggcgccaagcggatgaagtaaaaccccgagaaacaaggtagaaaataaatgcaatatatgcgccagtaaatgcaaacactatacttgtgaacattacgccagtgacttcgttagagaagaagtcaaataaaaggtacccgttgatcaata

SEQ ID NO: 14589 - DNA, 437 bp, Gossypium hirsutum
  Clone ID: LIB3829-034-Q1-N6-F1
ccaaaaaaaaaaaaacgggggttaaaaaaaaaaagcgcaaaaaagagttaaaaaaaaaaaggggggggagaaaaaaaaaaggggaatacccccataccccccagggaaaaaatccccaaaaatggaccccaacaaaactgggaaaaaaagggggggggaaaaaaaaaaaaaggggaagggggccaaaaaaaaaaaaaaccccccggcccacagggaagggaaaaaaaaaaaaacaccccaaaccccaaaactttttgggaaaaaaggggggcaaaaaacccaaaaaaagggggggttttggggggccaaaaccggggaaaaaaccccccggggtgggccccccccccaaaggcatggaaaaggggtttggaacccaagggccccgccccccacgggggggcccttggggcaaaaaaaggggggcccccccggggggg

SEQ ID NO: 14590 - DNA, 456 bp, Gossypium hirsutum
  Clone ID: LIB3829-034-Q1-N6-F2
gaaaagagaaaagggtccatgccattccactaattttacttccaaaactccaaacatcatcaaatgaaataaaaatgtcaaaaacaccgaaaacaaaactgatacaaccactccgcagaaactaaaatttactgcgacacacccaaccacttgggagaagttctcgaactctgtgtaatcgctgtcggagatcatagtttgataccatgctttgccagctgacttgattgcggttgcttcctccttagatataggcttcctcttcttgtcaagcttctccttcttggccttaacacgctgtgcctcagccaaaagagacatccttctagcagtctttgcgtaagggttcaacttcagcatagcattcaagttcttgagtggattcttcttcaaaggtgccctcttgatctccttcttaatcggcttaacaaccgactgaacctcgtcggagttaat

SEQ ID NO: 14591 - DNA, 541 bp, Gossypium hirsutum
  unsure (1)..(541): unsure at all n locations; Clone ID: LIB3829-034-Q1-N6-F4
tcgcgaactagnaccaaccacaacgggtcacttgatatacaagcttggaggtattgacaagcgtgtgatcgagagttcgagaaggaagctgctgagatgaacaaaaggtcattcaagtatgcctgggtgctcgacaagttgaaggctgagcgtgagcgtggtatcaccattgatattgccttgtggaagtttgagacaaccaagtactactgcactgtcattgatgctcctggacatcgcgactttattaagaatatgattacgggtacttctcaagctgactgtgctgtccttatcattgactccacaactggaggttttgaagctggtatttccaaggatgggcagacccgtgagcatgctctccttgccttcacccttggtgtcaagcaaatgatttgctgctgcaacaagatggatgccacaacccccaagtactcaaaggcaaggtatgatgaaattgttaaggaagtttcttcttacctgaagaaggttggttacaaccctgagaagattccattcgtccccatctctggttttg

SEQ ID NO: 14592 - DNA, 417 bp, Gossypium hirsutum
  Clone ID: LIB3829-034-Q1-N6-F5
aaaaaaaaccatttactaaggggggcccaaaaaattccttaaaagggaaaaaaaaagggaaaaaaaaaaaaaattcccggggggggggggggaaaaaaaaaagggggccaaaaaaaaaaaaaagggggccaaaaaacaaaaaaaggggggggaaaaattggaaaaaaaacccccaaaggcccaatcaaaaaaaaaagaaaaaaaacccaaattttcccattaaatttaaacccccggcccgaaattcccccttttcccgggcctttaaaaaaatgggaggggcacccgggattgggggggcccaaaaaacaaaagaatttaggttcccccccggtttgggaaaccccatttaaaccccccctttcccgggaacccaaggggagaaaaagttttcctacaaaaaagagggggaaaatt

SEQ ID NO: 14593 - DNA, 517 bp, Gossypium hirsutum
  Clone ID: LIB3829-034-Q1-N6-F6
gttcccaagtttaccttagccttgccttgtttgtttggttccttgtaattatatatattacaagtgtttcagacagaacacaattacagtgtaaaattagaaactcccagaatcccgagcaatttctattattattcccatagcatctcttccatattttgctaaagctgaagaacgaggctattattaaaaagtccattatgaaatgagtttggttcaccaaaatcactcacttaggcagaagccatgtgccggatcaagtcgatcacacgagaactgtaaccccattcgttatcgtaccacgcgacaagcttaacaaaattgtcatttaatgcaatgccagccttggcatcaaagatgcttgacctgctgtccccaacaaagtcagttgataccaagtcttcatctacgtagccaagaattccttttaaattagtttcagattccgccttgatagtggccttgatatcttcataagaagccttcttctcaagcctaaccgtgaggtcaactacag

SEQ ID NO: 14594 - DNA, 525 bp, Gossypium hirsutum
  unsure (1)..(525): unsure at all n locations; Clone ID: LIB3829-034-Q1-N6-G1
aaaccagtaaaaaaaaggatataagaaattattcttgaaaatcgatgaaccaaaatggatgggaacctataaaaattctacaagttcttttctagaaccaacccgaacttggctaatttccattaaacaatggagnaaacggccataacggttacaaagctggaaaaccaagacaaatttaggatattaaagaaatttattaggcgacaagaacaagagctcaacaaggagtgagtgagtgccttttgagcaacctattctaccatcaaacagctactcaatgcaaattgaaactccattcttttaagaactgacaacaatcctcaaacctcaaaaccaccacatattctttgcttaagcaagggcacctgtacaacctgtggcaggagcagttccaacttttgcactgctgtatttcttggtgatgaatctgaagaaatccctccacaacaactcgaacatcagccagttcatttgagtatcaggtgagccactgcccccatcatttttctttgaggtagcaga

SEQ ID NO: 14595 - DNA, 523 bp, Gossypium hirsutum
  Clone ID: LIB3829-034-Q1-N6-G2
ggatggatgcaatttcacatagattctgggtgaggctattctcaataggaagatacaaagttccaagtcttgaggaaaccttttgttcataccacacagttaagaagcacataaagagttcagaagcatgagtaacatccgaataacgagtctatgcgtttgcattacagtcacacgtcagcctgcaaggtaaattttcccccaaggaccactgattaggacattgttaacaaccagaaaatgcaaatgcatcactttggatagagaatgtcatagtggcctggacgatatagcaaggaaataaaaggcttgacaggaacagtgctaccacctttagcatttgacttatcgcccgaagtaggaaggaaatcatgatggtttacactaacaccgccaatgtcacaagagctccgatcaaggtacacaacacgaattggcacacccagagcatctgaaagggcagtaatgtgcacatgatcactctcttcacccattggctctacggatgacttgcaaaactgtt

SEQ ID NO: 14596 - DNA, 492 bp, Gossypium hirsutum
  Clone ID: LIB3829-034-Q1-N6-G3
caaaaacatactcataatattgtcaattttatcctgaaaaaggcttctcctaactaggaaaagagcccaatgtcacccaagatagtctaattcacgcataaatgaaaaatgaaaatgtaacaacttgctaagatctaaacaggcagtaaggcagtaaaggagcttaatcaaagagagagaatcccatatcgtcatcactctcctctttctcttcctttttctcctcagctgcaggagcttcagcggcagcggcagcgcctccagccggagcggcagcagctcctccacccccgatgaaggctccgcctacagcacctccaataaccacctggaaaacggcagaattaggggtaacgacagagaaagaggaggtgacaccaccagaggagtcgcaggcggtggcggcctggacaagtttccgctggagctcgtaagtggaagcagcagagctctcaatctctccctccaactgcttggcagaccactcaccgc

SEQ ID NO: 14597 - DNA, 515 bp, Gossypium hirsutum
  Clone ID: LIB3829-034-Q1-N6-G4
aattgtacaaattaaatccctaatagtcaaataacgtccaatacagcatcctaccataagtaaaacagctacatctaaaattccattttaacaagtgcattggattcttcagatccataatgaagccagtccttggcacagattagggcttccacggtctccggtcgtaaggagcttcggtactcatccagttgctttattatgatgtcaaagaccgagtccggagcagcagctgatactggaattgacaaaatgtcacgagccatcttcgaaagagttggatacttcatcttattgagcttccaccagcctaatacatcaaactcttggactcgaggcaacaaggactcttctaagtattgatccagctcagatttcatttgctggctgctagtctccataatgtacacatcgaaatctgtaagtccctggtctgaaagaagatttccttgttgggattcatcggtctttccattgtttcccgcattgccttcttctgtgtaagttggtgtcaa

SEQ ID NO: 14598 - DNA, 519 bp, Gossypium hirsutum
  Clone ID: LIB3829-034-Q1-N6-G5
aaaaatgaaacccggcctatataatatgctttgccccatttactctcaaaaaaaattcaagaggtagataaaaccagctacaacagccgaagagtataatgcccctactggccattgttttcatagaatttgacagaaaaccactccatggcatatgcatcaaataaggaggtaaggtgtgtggactgaacctaagacagagacaggtaggtacttacggagggagtggacttcgttactttggggctctgcggcggatggttgggggtgatttcaccgaggctttgcttactcgatatgagctgggagaatattttatacatggacaaagcttccattatacttaccgacaccctttcgatgtgcgttttagccgcgccatttaagtttggaccctcacttaatattacagaagtgagctaccattgaaaagccttggagtcctactttgcaggcaccaaatcacaagcctcttcagaggtggttgggtgcggaccttgagctactcggagacccttc

SEQ ID NO: 14599 - DNA, 540 bp, Gossypium hirsutum
  Clone ID: LIB3829-034-Q1-N6-G6
aaacgaagtgttttttattatcttgatgggtgtggatgcgccgtatttgagaggcatacataaataaaatgtaaataatacttaaggctacaaccttaagaactgctaccctttctttttcaggaataggagtcaagtaggtaaggagaacaagttcatctccacccttagaatattaagttacttaagaaactaaattagttaacttcaggctctaggactcaaagaaagagtaatatcttggaagaccttaagcctcttatcagttttctttggaaacatcctttgagtcactgcttcatttgctgggcctagaactgctgctgcaatgatagcctcttcaaagtcttggctgtctggtaataaatcaaccaatttgtctcctttctcttcagttgaaagagagagccttcttctagtcttaatctccggtttttctggttctgcagataaaagctttgtgcagtctccacccatttcattcactctcatagagttagctgagtttcctgaccgtgttcttttaagggtctcatgcaa

SEQ ID NO: 14600 - DNA, 527 bp, Gossypium hirsutum
  Clone ID: LIB3829-034-Q1-N6-H1
gaaaaggaaatatactttccaaacttagattcactcaacatcagacaggatacataaaaatcaacatgttaacattaaagcaacacataagagggattgtggggcgatgaaaagaaaagaatgcaagagaaaggacccaatcattgttccacaacaaagtgtttaaacataatcaaattcagggaaatcccattagacattattaatggagaaaatacaagctgaaagttcaagtagcagctaccagatccctgtgtttctcaattttcttctcaagatcattcttttgggctccaaccaccctatccacttccttccctttctttagcaacacgaaagttggcattccttgaaccccaaattcctgcgccacatcaggcagttcatcaacatcaagttttacaaactgaacttcagtaaacttagcagccatgccattcaaaacaggttccatgaatttacatggcccacaccaagaagctgagaaatctataaccataagctgtgaggtttctttgacagagttg

SEQ ID NO: 14601 - DNA, 554 bp, Gossypium hirsutum
  Clone ID: LIB3829-034-Q1-N6-H2
tctccttgtcattgtgttggcttccaaaataaaaggcacttcctttagggatgatttctgcactagtggtgttcctagtggctcttactagggttcaactctcaaattgccaacatctcaatgccaaaatctcctgcttcgactgccctcataattatgacttctcaggcatccaagttgcagtgaagtgtgagaaagtgaagaaactagccactgcgaccactgaagaaaatggctctttcaaggtccagcttccatcaggcatctcaaacactaactgccttgccaagctcctaggcggaccaaaccagctatacagcaagaagaaaaacctggtgtccaaggttgacaaggtcgggacatcaacccaacacttacaccctctccactccactggctttctacacttcatgccctctggcatccattgatgctaaatcatgtgcagctcaaacagggatcggatcatccaagaccgctgatctgtcactaccctcggagtggggacttgcaccatccagctattatgaccctttcttacccatcatctgcat

SEQ ID NO: 14602 - DNA, 482 bp, Gossypium hirsutum
  Clone ID: LIB3829-034-Q1-N6-H3
atggtaaaattttaattggtaaaagggggaaaagggggggggagagggggggaaaaaggggggaaggggggggggggggggaaaaaaaggggggaaggggggggaaagagagaaaaaaaaaaaaaaaaaaaaggaaaaaaaaaaaaaaagaaaaaaaaaaaaaaaaaaaggggggggaacgacgaaaaaaaggggggggggggggggggggaaaaggaaaaagaggggggggggggggggggaggaaaaaagggggggggggggggggggggggaaaagggaaaggggggaggggggggggggaggggaaaaagggaaagacggggggggaaaaaacaagggggaaagggaaaaaaccaaaacggggggggggggagaaaaaaggaggaaggccggggaaggggcgacggggaaccccaggagggcccccgggggggagggggaggaccccgagggggagggggaaaaaggggaaaaggggg

SEQ ID NO: 14603 - DNA, 507 bp, Gossypium hirsutum
  Clone ID: LIB3829-034-Q1-N6-H4
agcaacaaaccccaccctgcccgcttacaaaatttcactaaattgatccaaaagggagtcggccataacactggcatgcctgtttctaaaaaacttattcaacccccatgttgggccagctactacaccgattgcatacatttattagctgcacacatttaacaagtgagcggacatctataaatgggtggaggctccacggccaatgtctttcattgcttaaacaggtttctaaaaacatatggaagaatccccccattgtcgaagagagccaattcaaccttagtgcccaagcgggcagttgctattttaaagacttcccattatccgctgtgacagccactatcttgaccgggccttatatcggttattttggttgggaaatctatggtgtaacgctcatgaccggttaaacctaatgggggggaatcctccccaatcttaaaacaaagtggaatgatgcccatgcctcccaaattacttatatggattctctcaaaacttttg

SEQ ID NO: 14604 - DNA, 534 bp, Gossypium hirsutum
  Clone ID: LIB3829-034-Q1-N6-H5
aacgaaaaaaaaaaaatctaatgtattatttaattctaaaacttgaaaatgaaaaaacattcttcaatgtgcagtaattacataggcaaaataaataaacaccagaagatgaaaaaagattttcagaatttcaagcctggctgccgcttggattcggttacaatcaaacaatcgaatctatcagtgttggctcagcttgcgctttttggccatccgccgcatctgctcccgccgctcttcttcctctatcaacctcaattgttcttcatcctcctgccttgcaattttagcacttcttctttcttccttcataatctcatcccaatttgcctccatgtcactaacgtcatcatcatcacaaactggatatcgatcagtgtggaacatatttctgatcatcattagagccttttcatcttcacttaattgctttttcttgggtcgctgaacatttggtttcatatgagattgtgatgagactggcttgattggcttgtttacctgtggctttgacgatactggaggcctttggtg

SEQ ID NO: 14605 - DNA, 528 bp, Gossypium hirsutum
  Clone ID: LIB3829-034-Q1-N6-H6
gcattaaggcaaatactatatattcttccacacatccctcaaaacacttttatttcaaaccatttggtcatcttcaaacaagaagagaccaaatcccacatcattttcccatccccagacactttcccatcacccaaacacaaaaaagaactctaaaaataaaacaaaaacctaaccatcatgaaatttcagtaaaacaagaaacaatcaaaccatccggatgctttttctttctcgataaaaactcattaactgtccccctcagtacctgtaatgaggaggcttgtaaggaccttcaacaggcacactaatgtaatcagcttgatctttagtgagcttagtgagcttagctccgagcttgccgaggtgaagtgcagcaactttctcgtcgaggtgctttggcaatacgtaaaccttcttctcatattttccagttgccttctccttccatagctcgagctgggcaatcacctggttagtgaacgagcaggacatgacaaaacttgggtgtccagtggcacatcccaa

SEQ ID NO: 14606 - DNA, 531 bp, Gossypium hirsutum
  Clone ID: LIB3829-035-Q1-K6-A1
gaagacgagagctcatctctctgcttcaaagctcctgtccgggtagaattctcttcttcctttgcgttgtgttctttgttgttcaatcgccatggcttcaaagcggattttgaaggaactcaaggatttgcagaaagatccacccacttcttgtagtgctggtccagtagctgaagacatgtttcattggcaagcaacaatcatgggaccctcagatagcccttatgctggaggtgtgtttttagttactatccatttccctccagattatcctttcaagcctcctaaggttgcgtttaggaccaaggtcttccatcccaacatcaacagcaatggaagcatttgtcttgatatcctcaaagaacaatggagccctgcactaaccatttccaaggttctgctctcaatctgctcgttgctgaccgatccaaaccctgatgaccctcttgttccggagattgctcacatgtataagaccgatcgggccaagtatgaagccactgctcgtagctggacccagaagtatgccat

SEQ ID NO: 14607 - DNA, 531 bp, Gossypium hirsutum
  Clone ID: LIB3829-035-Q1-K6-A10
cactgaggaaccaactgtcgccgtggaatctgcgcctgagctggcggaagagaatcccgctgaggctacagccaatcccaaatctggcaaagcaaagaaagctaaagagcccaaagccaagaaggctgcagctcctaggaagcgacgagctcctcctgctcatcctccttacgaagagatggtcaaggatgcaatcgttactttgaaggagaagactggatcaagtcagtatgctatcactaaattcattgaagagaaacagaagaatcttcctggaaattttaagaagcttctgcttttccatttgaagaagcttgtggctgctgggaagttggtcaaggttaagaattcgtataaacttccttcggctaaggcttcgaagccggctacaactgcttctgctccggctaagaagaagccggctgctaagtccaaacctgcttcgaaggccaaggaagggaaacgtgctaaaacaacttctaaatccccttctaagacaaaggctaaagcggcggctaaaccaaaggctgc

SEQ ID NO: 14608 - DNA, 529 bp, Gossypium hirsutum
  Clone ID: LIB3829-035-Q1-K6-A12
cggacgcgtgggtgcgtcctggggtttctgatagtattattgctgagttaacagaatgtaatgcagctctgtcacaacagcgtaaaaagcgccagatacctcccactttagctcccattgatgctttggagaggtatacccaactatctagtcatcctcttcacaagactaacaaacctggaatcacttcaattgatatcaatttttcaaaggatattgttgccactggaggggttgattcaagtgctgtactctttgatcgaacatctggagagatcttatctacactcagtgggcattctaagaaggttactagtgtaaaatttgtagcccagaatgatgtatttttaagtggttcagcagataagactgttcggatttggcaagggtctgaagatggaaagtatgattgcaggcatattttgaaagatcatacagctgaggtgcaagctgtcacggtccatgccactaacaactactttgtaactgcttcacttgacatgacgtggtgtttttatgatctttcgtc

SEQ ID NO: 14609 - DNA, 527 bp, Gossypium hirsutum
  Clone ID: LIB3829-035-Q1-K6-A3
tgaagcctttggtgattgagaggattgagacgggtgatggattagttaaagaggataacactggaataaatgctagtgagtcagatgtaaatacaaatgatgtagagggttcgaatttgaccgaacctaggattgagagagaggtgtctgagattgagaaagaggcatggaacatactacgtggtgctgtggtgaactattgcggaaatccagtggggaccgtagccgctaatgatccagctgacaagcagccgttgaactatgatcagatatttatccgtgactttgtaccttcagcacttgcctttctgctaaatggggaggcagagattgtgaagaattttcttcttcacacattgcagttacagagttgggagaagactgtggactgctatagccctgggcaaggattgatgccagcaagtttcaaagttcgaacagtccctcgtgatggaagccctgaagcatttgaagaggttttggatcctgattttggtgaatcagccattggtcgtgttgcccctgtt

SEQ ID NO: 14610 - DNA, 531 bp, Gossypium hirsutum
  Clone ID: LIB3829-035-Q1-K6-A4
caggaacagaggtgctgaaaaactttatggttatttagaagcagaagctttaggacaaaatattattaagcttgtttgtcatcctaaggatttcgggtttgcagtaaatatagttcaacgggttattattggggagagttggactggactgtttcctattaagaatagactaggggagaatatttctgtagttgcaactgttactcctttttatgatgaagatggttctgtggtgggaatcacttctgtgacctgtgattcacggccttttcaagaaaccaagtttgaattttcagctgaaaggcaaccgaaaggaaattcttcagcctttacccggtctaaaaacaccatctcggttaaacttggtcttgatcctcagcagcctctgcaagctgcaattgtatcaaaaatatcaaatttggcgtccaaggtgagcaacaaagtgaaatccagaattaggacaggcgagaatcgtgttgatgcttatgatcataaagaagacgcaacttacagtggagtctgtacaccgaa

SEQ ID NO: 14611 - DNA, 531 bp, Gossypium hirsutum
  Clone ID: LIB3829-035-Q1-K6-A7
ctcggaagttaaccgacaaaccctttggggttggtgttattctgccatttcctcacaaagaaaatgtaaaggctatactagaagagaaggtagcagtgttgcaactgtattggggagaatgctcaaaggagcttgtaatagaagctcataatgctggggtcaaggttgttccccaagttgggagtttggaggaagcaaaaaaagcaattaatgtgggcgtagatgcaatcattgtccaaggccgtgaagcaggagggcatgtaatcggacaggaaggtctaatttccttgttgccacgagtagtcgatcttgttggtgatcacggtattcctgttattgctgctggaggcattgtagatgctcgtggttatgttgctgctttggctcttggtgctaaaggcatttgcatgggtacaaggtttctggcaactcatgaaagctatgcgcaccctacgtacaagcggaaactgattgaatacgataaaaccgagtatacagatgtctttggcagagcaaggtggcctggtgcac

SEQ ID NO: 14612 - DNA, 527 bp, Gossypium hirsutum
  Clone ID: LIB3829-035-Q1-K6-A9
cggacgcgtaggcaaaatctcaaacccagatttgttctctctctctctctctctctccaatcaattaattcctccattggaggagcttagggtttgttggtgttctgatctttgctctgtctgaaaaataaacagaattataaaccaacaccaacgccatgggaagatttgaagagggaggattcgattcagtggtttgccctaagcctatacgaacctttagatggtctaccaacagctgttatcagactgagatggctgattcaaaagctggtgcagagcttcttgatataatcctctccgagtttcagggagggtatggggccgagaaccccaccgaccaaatggcttcatcaccaccgtatttctgtggatcaccgccgagcagggcgtcgaatccggtaatccaagatgcccgattcaacgacgagcagccggtgctacctccactaacatccccgggaccctcctcaaggggaggatgcgtgagggtgaaattcgggcagatgccagctgctgtacgaatc

SEQ ID NO: 14613 - DNA, 537 bp, Gossypium hirsutum
  Clone ID: LIB3829-035-Q1-K6-B1
cggacgcgtgggcggacgcgtgggttcaaataggtgtcatgtttgtagtattctagagtgcggcacaattatgactgtgtcagtcactgtgctttaccatcttaaacatgctccctcctctgccaatcctatgaacgcaattccccgttgacactaaatctttgggtttgcatggaggaaatgaattgggatacccttcatgctcgaggttgacttacccgattgcgggaatatcttagataatgaaccggtaacggaacctcctgctaaaccttgttcaacccacaatcccgatgaagaaccggtgtgtcttcgaggatcggggcgatcgagaaggttttgatggaggatgataatcttgatcctaggggtgagactcaacctgtctacgatgatgatttcttggccgatttactggttgattcacctcctaggagcggccgcgatgtcggctggcgtctacggcgctgatttgcacaaacagagccagacccacaccgacgtcgataaagacgatcccattattaagaaacagag

SEQ ID NO: 14614 - DNA, 522 bp, Gossypium hirsutum
  Clone ID: LIB3829-035-Q1-K6-B11
aatcaaccaccaaacctagaaggccagacctgaacaaagctaagatcatgtattcttctcctccaaaacagcctttctctctttacccacaggtcgatctttcaaacccagacgccacttcatcttctccttcttcttcgtcttctttgtacccttctttggacatgaaagatttagccgaaaacctcttccccgacgacgccaccgccttgcacacccaccaagattctgcagaacaactcctcctcaaggttcctggtgccatcgttcaccttattgagcgagaaaccagcgttgagcttgcttgtggtgatctctgtattgttagtctccttcaaggcggcaacgttgttgctgtttttgctcgccttggtgacgatattcaatggcctttggctaaagatgagcctgttgtaaaacttgatgcttcccactatttctttactcttagagtgccatcgaatgggtcgtttgaagacggaaaagattctaatcaaaccgaggatgttttgaactatggtc

SEQ ID NO: 14615 - DNA, 521 bp, Gossypium hirsutum
  Clone ID: LIB3829-035-Q1-K6-B2
ctccaaatgttgctgagaaggcttgcggtgctctctattttcttgctcaaggttacgaggaggtgggcccatcgtctcctttaactccttttttccaggaaattgtgcagtcccttctcactgtcactcatcgagaagatgctggggaatcccggctgaggacggctgcctatgagactttgaatgaagtggtgaggtgttcaacagatgagacagctccattagtgttgcagttggtgcctgtcatcatgatggagcttcataacagtcttgaggggcagaatctgtcatctgatgggagggagaagcaaagtgaattgcaagggcttctttgtgggtgcttacaggtcattatccagaagcttggttcatcagaaccaaccaagtatgtgctcatgccgtttgcagatcaggtaatggggcttttcctaagggtttttgcttgtaggagtgcgactgtgcacgaggaggccatgcttgcaatcggagccgttgcttatgtaactggggcagattttgcg

SEQ ID NO: 14616 - DNA, 524 bp, Gossypium hirsutum
  Clone ID: LIB3829-035-Q1-K6-B3
tatttttgtcggtgaaagcagtccattccatgcagaatctgtgcatatgagtgacaaaattggaagaaagaattgcactcttgttgaggtagatttctatttgccgagttgattctttcccgtttcttcaactttggtttcagtctcaaactttgaaggcagtgagcattcataagtttggctgaatatcgtcacccagaatcattaaattttttcgttggtttttgttcattatcaggttaaagcatgtggctcattggtaacagaagagcacccattggccatgctggtcccaattgaattctttctaatgggatttggtttccaaagacaaccacattttgcttcatcatcaagcaatggttcaaacccttcaagtccatcaagccattcctgcatagctcctgaacttctctcccctgagggtctagggatcaagctcaaaccaatcaaaacccgtgcagatattgaaatttgatgagtctcgaagctgctgcttatcgattttacacgtatcgaatgta

SEQ ID NO: 14617 - DNA, 533 bp, Gossypium hirsutum
  Clone ID: LIB3829-035-Q1-K6-B4
cggacgcgtgggctttgacgtccaaattgaatctccccaaaccctaaccatgacctgatccgaaatccccgaaatctctcatcttcatcctccaccgtccgatcaaagctccatcatagaataaaagcaaaagaaatcaccagaaaaacctgaactgcttgacgatgccgtcccacggggatctggatcgtcagatcgagcacttaatgcagtgcaagccgctatcggaaacggaggtgaagactctgtgcgagcaggcgcgtgcgatccttgtggaggagtggaatgttcagccggtgaagtgtccggtcaccgtctgcggcgatatccacggccaatttcacgatctcgtcgaactgtttcgcatcggtggccacgctcccgacactaattatctctttatgggcgattacgtagatcgaggatattactctgtggagactgtcactcttttagttgcactgaaagttcgttatagagatagaataactattttaagaggaaatcatgagagccggcagataactcaagtg

SEQ ID NO: 14618 - DNA, 523 bp, Gossypium hirsutum
  Clone ID: LIB3829-035-Q1-K6-B5
cggacgcgtgggtttcaattgggatgcatcgggaatgaccgatgaacagatgagagacttcattccaagaatagccaagcttggtttctgttggcagttcataacgttagctggtttccatgctgatgcattggtgaccgacacatttgcgagagatttcgccaggagggggatgctagcgtatgtggagaagatccaaagagaagaaaggaacaatggagtggacacattggctcaccaaaaatggtcaggtgccaacttttatgatagatatctcaagacagttcaaggaggtatatcatccacagcagccatgggcaaaggggtgactgaggagcaattcaaggaaacatggactagaccaggtgcagggaacattggaagtgaaggcaatctggttgtggctaaggctagaatgtaagacaagcaaaaatgagctgaaggatggtctattttggacttgggagaataacccaattcttgaattttggaattgggacggaaaaaaaaaaagtggtaataa

SEQ ID NO: 14619 - DNA, 528 bp, Gossypium hirsutum
  Clone ID: LIB3829-035-Q1-K6-B6
gctccttattctttcttacctacatcaataattgattctggttgtaaaattatttacatttgcagggaccccaaggatacatttgtttcaatgtatcacatctgtaccaggtatgcgaaatcccaaaacactcaacccatagaacttgatgaagcgtttgagttattttgtgaaggcgtaagttggtacggaccttattgggaccatgttctgggatactggaaagcaagcttggaacatccggacaagtttatgttcttgaaatatgaagaaatgaatgaagatactgttttgtatcttaagaaattggcagagtttatgggttgtcctttctcaacagaggaacagcaaaaaggggtacctgaaaagattataaagatgtgtagttttgagaatctaagcaacttggaagtgaataaaagtgggatacatcgtgaagggcaagggaatttggagattcaaaacaagatttattttcggaaagggaaggttggagattggaagaattatttgacgcctaaaatggca

SEQ ID NO: 14620 - DNA, 533 bp, Gossypium hirsutum
  Clone ID: LIB3829-035-Q1-K6-B7
agacaaaccaacaaacatggccgatgaaactccagcccagaatccccctatggcagcagcgcagccgcctccatcttctgccacggtgtccgactccgactcacctgctgttttagaaaaacaagacccttccccgacgtctcatgtaccagctgtgtctgtttctgttaccgaatctgtttctacgactatagctgaaaaagaagagcaggctccgccaccagaaccggcggcattggaacctgattcatcggataaagggccagggaaagaggagctgcctccgacgccaccgccgcaagcagtggagctagaatctgagccacctgctgtaaccgaggcaccaaaggaagaaaacccaccagctccagcagcagaaactgtagtgatatcggaatccgagtcgcagctaccgcctgctccagcgcagcaggaggtggttacggagtcggagtcactggcggcgatgatggagaaagaagagacgggggcaccagcagagcctaccgcggcgggtactactacaacaacaa

SEQ ID NO: 14621 - DNA, 524 bp, Gossypium hirsutum
  Clone ID: LIB3829-035-Q1-K6-B9
attacaggctgcaaggaaatctgcgccaacgaccggcggagtcaagaagcctcaccgctaccgtcctggaaccgtcgctcttcgtgaaatccgtaaatatcaaaagagcaccgaacttttgatccgcaagttacccttccagcgtcttgttcgtgaaattgctcaagacttcaagacggatttgaggtttcaaagccatgcggtcctggcattgcaggaggctgcagaggcataccttgtgggtttgttcgaggataccaacttgtgcgctatccatgccaagagggtcaccattatgcccaaggatattcaactcgctaggcgaattcgtggggagcgtgcttaattttcttttttaatttgtattgattcaggggttgtttttgtgggtaatttcggattctatgtaatctaactggattacatctttaaaagatttccattattcatgcagcttgaatagctggttcattcacatcatattttgtcggttttgcgatgaatgatatttgatactgtgttgg

SEQ ID NO: 14622 - DNA, 131 bp, Gossypium hirsutum
  Clone ID: LIB3829-035-Q1-K6-C1
ataaacaaaacaaataaaataaaatatctataaaaggaaaaataatagtaaaagttgaaactatgtaataaggaccacaattggaagctaaacaaattttaaagggggaaatcggaaatgaaaaacaaaaa

SEQ ID NO: 14623 - DNA, 529 bp, Gossypium hirsutum
  Clone ID: LIB3829-035-Q1-K6-C10
caaaattattattcttccttttctaccatctcacatcctcttcagcttcccatcggagatcttttcaacaaatctcaaagataattggaatttcgagtgagcaagaagaagaggggtttgaaagaacaacagcagcagccatggcgaagaagatcagcgtaacaaagaaagccttgataccaggttcaatcaaaccctcaagaatgtccaagggtacctctttctaatcgttccaatttcccattacttttcttcctctattttctttctggtttctcaatgtttgaatctggattgttcttttttcattggatttagagaaataccttttgatctttcgaatttcagttttgattctgaattcacgcggaagattttttcctcttcagggggaaattttgaattcgcaaaaattttcaattaggtttattgggtttaatttgttgcggtttgcacttaaaaacgccttttgggaattaaagccagatctcacaagttctacttaatggcataacccagtttctcttcc

SEQ ID NO: 14624 - DNA, 526 bp, Gossypium hirsutum
  Clone ID: LIB3829-035-Q1-K6-C11
caggggcatgtttccagttactgtaaacccgcagacatgttcaacagctgttgtccgcagaaagttgagcttctgtacaaaggcagttcttggaggaaatgtgcatgtaacaggagttcctacttctgtccctgtaagagtagcacacgagcttcatcaagctgggcatcgatatttggatgttaggactcctgaagagttcagtgcagggcatgtccctggggccattaacatcccttacatgtacaaagttggatcaggaatggcaaaaaaccccagttttgtagctgaagtatcatcacatttaggaaaatatgatgaaattattgttggatgtcaacttgggaaacggtctctgatggcagccaccgagcttctagctgctggctttactgcagttactgacattgccggagggtacgcggcgtggactcagaatgggcttccaacggaatgatgatgatgatgttggaggcagggaataaagttggtgatacaataataaagcatggaagacagagaacta

SEQ ID NO: 14625 - DNA, 527 bp, Gossypium hirsutum
  Clone ID: LIB3829-035-Q1-K6-C2
cgctaccattctctcttttccttgtgtctggtgtcttttagataaaagatgagtacgctggatgcaactagagcagaacttgctcttatagttttgtatttgaataaggctgaagcaagggataagatatgcagggctatacaatatggttcgaaattcttaagtaatgggcaacctggcacagcccaaaatgttgacaagtcaaccagcttggctcggaaagttttccgtctttttaagtttgtcaatgacttgcatggtcttattagcccagttcctcgaggaactccccttccactagctctgctgggaaagtccaaaaatgcgctgttgtcaactttcttgtttctcgatcaaattgtctggcttggcagaacaggtatctataagaacaaaggaagaactgagctgattggacgaatatctcttttctgttggatgggttcttcaatctgtaccaccttggttgagcttggggagctcagaaggctatctaaatcaatgaaaaagttggaaaagaatcttaa

SEQ ID NO: 14626 - DNA, 521 bp, Gossypium hirsutum
  Clone ID: LIB3829-035-Q1-K6-C3
gaatttgttcatgagtcagacaaaagaagtcaccttatggaccttcttcatgctcagagagcaaatggtgtccagggcaagcaagctcttacattagtttttgttgagacaaaaaagggagctgattcacttgaacattggctgtgcatgaatggttttcctgcaactaccattcatggtgatagaagccagcaggaaagagaacaagcattacggtcatttaaaaccggtgctaccccaatcctagtagcaactgatgtggcagctcgtggtcttgatattcctcacgttgcacacgtggtgaactttgaccttcctaatgatatcgatgactatgttcatcgaattggacgtacagggcgtgcaggcaaaactggtttagccacagccttcttcaatgagaacaatactaatatggcaaaggcattagcagatctaatgcaagaagcgaatcaagaggtacctgcttggctcactcgatatgcagctcgttcattcggagggaggaatcgtcgtcctgg

SEQ ID NO: 14627 - DNA, 529 bp, Gossypium hirsutum
  Clone ID: LIB3829-035-Q1-K6-C4
cccacgcgtccggtcccttcccgccgtctagttcttgcaaaagttcagatctatcttctatgattccttatccgaggtttgtttcttcagatccggtaccacagtttcatgatcttctctttgatatcagatatttgacgagggctaacgttgtctgatctaatgttttaaaaagtccttagacggcaagatccaaaggtttgcaggaatcgttatctatttgaagatatatatcttcctaaggatggtgaaagatttgatctcgccagaggtcgtggttctttttcttgatcttaggatctatcgtagtagaacaagtgatgttctgagatagcgatgttggatcgaaaggtggtttatgtttggaaggatgtgtaagatgtcagggcagaggtcctaattattttgaaaataaaaatagggctgagtcctgatctatctttgtcatccaagacctttgccatgtcgggtgcgcttgcatggcaggtcaccgaaacttaataaaaattctattttttcggtgttttca

SEQ ID NO: 14628 - DNA, 529 bp, Gossypium hirsutum
  Clone ID: LIB3829-035-Q1-K6-C5
gaagaggagtttccatttgatcatggcggttgctgagaacgctggggcgaaaattgggtcggcgggacagaatttggaaagcactgtagcgtcggcaaacgctccagacaaatcaaaacccagaactgattccgtgactgatgctaaagaagccaactttcaacagttaaagccagtagcagctaccatcaacgatggcgatagcaatattaagatgcaaaatggttttaataagaaccagcagcagatgctgacaaagacggctgggtgtaatgagtttagcaatatggaaaatgggggtgatggtaaaattttcaacaatcatatgaataatttggtcgagattttgtccaagcttaaccctctggctgaggaatttgtgcctccttcccttgctaatcatcatcataatcttaatgataaccaaaatcaaaataaagggtttttgcaaaatggctttggatatagtactgacagttttgtagtatacactaattctggcaacaccaatggacatactaatagaaga

SEQ ID NO: 14629 - DNA, 528 bp, Gossypium hirsutum
  Clone ID: LIB3829-035-Q1-K6-C6
gaaacttttggcagagataagaaaggcaggacagtcccgtcacaaagatattgggatgggtttgatacaaccaaacaatttgaggagagattgcatccagctatgtatttgctcgcccttgcatataggacactcgatattgaagatacaaagataaggaagcaaaccatctggaaatttgttgaaggaaagctatttagtatcctcagtttgtacaagaagtttgtttaggatgattacctctttgggctagtgaaggctagatgtgctttatctttcacgaaggtaccgatgtttcgtttgttttttggcttgaggattggttgcaagtatgctttatacttgattgaggagcatcaagcaaaagtcacactagcaaatttcttggtacaaaatggtcgaggggttcgacttgatgaatcctatgagctgattccttttgaggtcaaaaacaaatagctgcttgttttgcattcgatattcaattgatccgagcatagtgaaacgctatgtgggtaatgggatcta

SEQ ID NO: 14630 - DNA, 533 bp, Gossypium hirsutum
  Clone ID: LIB3829-035-Q1-K6-C7
agcatatataccctagcaaacccttttactagatacagactatcctgcccatgcatgctgctgcttgcctttgtttatgccggcctggagaaggccaaagtctccatgcaggaacagggggaccaaatgaaaacacggtaccctaacgagaaagagatggctagggaaaggtacgaatatagacaggaggatgcatagctgaggaaacaagaggcccgccatcttaacaccacgtgctggccatgctgtgggaggtggtatcggtggtgctggctacaccacagctgggtacaacagaggggatcctgcaggctatggcggtccctggggacatgactaccgcgggttccttaccgtatgtagcgtgtatgatacaggcaggcaagatgacctcaccagtatggtgtttggcggagatacagggggtgcttacggtacaacggtaaaccaagacttcccaagtgcggagcctaacaatgctgggactaaaaggagcacccgtggaggtacccagaatgatccttattatcgat

SEQ ID NO: 14631 - DNA, 526 bp, Gossypium hirsutum
  Clone ID: LIB3829-035-Q1-K6-C8
cgactgcaatcgagtgctaaggctgatcccagagtggtcaaaaactgttcaggactggaatacattgattggacccctgattgacaagatgtttgcagagccatcaaatgctactattgtcaggtttttgagctacataaatgaacagttagctgaagctgcagatgtagtcctttctcgtgttgtttttcaaatgaaaggtcagaaagggattgatgaagatttcttctctagatgggagactaaaacttgtccaagtgatgactccatgagaatgcagcaatctttgtttgagcgactttgccctttactcatagttaggctacttccattgagagtatttaatgatctcaattcctctgtcgtgtatggtcagcttcgtaatgcgccttttatgcatgaatatggagatgtcagcgtcactgttgatgatagtgttgttgctttccttgtaaatagagcatttagtaagttcgagtttgaagatgcaagaaaacttgctgctgagctttgtgggcgcatccat

SEQ ID NO: 14632 - DNA, 526 bp, Gossypium hirsutum
  Clone ID: LIB3829-035-Q1-K6-C9
aaagacatatctcatgattgatgaagatgaacctattcttgagaaagcaattgggactgaaattgaatggtatcctggaaaatgcttaacgcaaaagcttcttaaaaagaagcctaagaagggttcaaagaatgccaagccaatcactaaaacagaggagtgtgaaagtttcttcaacttcttcaatcctccgcaagttcctgaggatgatgaagacattgatgaagatactgctgaggagctacaaaatcaaatggaacaagattatgacatcggatcaacaattcgggacaagattattccacatgctgtgtcatggtttacaggagaagctatccagggagatgagcttgatatagatgacgatgaagaagatgacgatgatgatgatgaggaagaggatgatgaggaagaggatgaggatgctgacgatgaggatgaggatgatgacgaaggaagtaagaccaaaaagaagtcggctcataagaagagtggtaaagcagtaggggatgggcagcaaggtgag

SEQ ID NO: 14633 - DNA, 523 bp, Gossypium hirsutum
  Clone ID: LIB3829-035-Q1-K6-D1
cggacgcgtgggcggacgcgtggggcgaggttgaaaaacacgatccgagtaattgacaggcctcacggacagcattccgtcattttggctgaagatgctcccaagtacatggaaaaccgaaacgatagaaatgatccaggtccgattgtaagtggatcgagacagatatatcttacattccctgctgagagcacttttagtgaagatgatgtctctaactatttcagcaactatggacaagttgaagatgtacggattccctgccaacagaaacggatgttcgggtttgtaacctttgtcagtgcggatactgtgaagatgatcttggctaaaggaaatccacattatgtctgtggggcacgtgttcttgtgaagccttacagggaaaaatcaaagctggttgacaggaagtacccggaaagaattgagtctccaatgttttattctccacattatattgacatggaatccgagcttcagtcgattccaagaggatatgcaacatctaggttgttcaagaagc

SEQ ID NO: 14634 - DNA, 486 bp, Gossypium hirsutum
  Clone ID: LIB3829-035-Q1-K6-D10
gacgaaaaagagtatcttatttaatggtagttaatcgtaaaaactacataaagcaagttcctgaaaaccaccaaacccagtgacgataaaaacagcaccataaaagagtctaaatgacagacattaaatattctagacattagacaacatcccaacttaacacatagttctctttttcttctctaagagagctgtccgcagtcagcaacaacaacgggcttggaagttcttccactgctagacccaactttctcaatggctttcaccacatccatgccttcaacaacttgtccaaacacaacgtgctttccgtcgagccactcagtcttagccgtgcaaatgaagaactgagatccgttagttccgggaccagcgttagccattgagagaataccgggaccagtgtgcttcttgatgaagttctcgtcagcgaacttggatccgtagatggattcacctccggtaccgtttccggccgtgaagtca

SEQ ID NO: 14635 - DNA, 516 bp, Gossypium hirsutum
  Clone ID: LIB3829-035-Q1-K6-D2
cctaaattctttgctcttcttcactcagttcactgaaaccgtaaggagaagatcggagagaaaatatggcggccggcgatcgcaccgttttgcagtttaactcaccgtcatcggcgagcctgtcagcgaaagttcaccctctcgtcatatttaacatctgcgattgctacgtcaggcgtcccgaccaagccgagcgcgtcatcggcacgcttctcggctccgtcctccctgacggaaccgttgatatccgtaactcctatgcagttcctcacacggagtccgctgaacaggttgctttggatattgaataccatcataatatgttagtctcccaccaaaaagtgaatcctaaagaagtcattgttggatggtattctaccgggctaggagtcacaggcggcagtgcattgatccatgatttttattctagggaagtatctaaccctattcatttgacggtggatacggggtttaggaatggagagggtaccgtaaaggcttttgtttctgtcaatt

SEQ ID NO: 14636 - DNA, 524 bp, Gossypium hirsutum
  Clone ID: LIB3829-035-Q1-K6-D4
ctttgctttgctagaacgctgaaaaaaaaaggggttccaagagaaaagtagaagaaatggcctcaaagcttcttcgtcaaaccctaaccaaaaccaacagaaccgccgctatacgctgcttcttcaccgcggcttctgtcgcttccccttccgagtatgagtacccaacaggaatcaccatgaaaggtgtgaaaatttcgggtcgtccgctttacctcgacatgcaagcgactacccccgtggatcctagggttttagattcgatgcttcctttttacctctctcgttacgggaaccctcactcccgtactcacctctatggttgggaatctgaaaccgccgtcgaaacagcccgcgcacaagtcgcggcactcatcggggcttccccgaaagaagtcgtcttcacctccggcgccaccgaatcgaacaacatctcaatcaaaggcgttatgcatttctacaaagacaagaagcgccacatcatcacgactcaaacagagcacaaatgtgttttagattcttgt

SEQ ID NO: 14637 - DNA, 518 bp, Gossypium hirsutum
  Clone ID: LIB3829-035-Q1-K6-D5
cggacgcgtgggctccaacttatcaggtaactgaagaatctgttgttgtgtttgatatcataaacctctccaatggagattgaccctaaacctgattctgaaaatgacgccctcgttctcgttaagcaaggagctgaagctagagttttcgagtccgtattcgctggaaaaaggtccatcatcaaagaacgcttctccaagaaatacaggcaccctgctcttgattctaagctcactctcaagcgtttaaacgcggaagctaggtgcatgaccaaggctcgacggcttggcgttttaactccggttctttacgccgtcgaccctgtgatccataccctgactttcgagtacgtcgaaggcccttccgttaaagatgtttttctcggaattgggtcaacaggcgtctttcaagagcgtttaactgatatcgccacccaaattggcgacgcgattggcaaattacacgacggtggactcgtccatggtgacctcaccacttcaaatatgttgatcagaaa

SEQ ID NO: 14638 - DNA, 527 bp, Gossypium hirsutum
  Clone ID: LIB3829-035-Q1-K6-D7
tcttcttcttcttctctttagtcttttacgctgctgccagaaagtatagctagaagaaaccatgccgaagaacaagggaaagggaggaaagaacaggaagagaggaaagaatgaagctgacgatgagaagcgtgaacttgtgttcaaggaagacgggcaagagtatgcccaagtgcttcgtatgctaggcaatggccggtgtgaagccatgtgcatagatggtactaagcgcctttgccatatccgaggaaagatgcacaagaaggtttggattgcagctggtgatataattcttgtcgggcttcgcgactatcaggatgacaaggctgatgtgatccttaagtacatgcccgatgaagcaaggctcttaaaggcatacggtgagcttccagagaacactcgtcttaatgaaggtattgtcgatgaggaagatgaaggaggtgcagatgattacattgagttcgaagacgaagatatcgataaaatatagggttatggagctggttttgtttgaatgatttgcttga

SEQ ID NO: 14639 - DNA, 531 bp, Gossypium hirsutum
  Clone ID: LIB3829-035-Q1-K6-D8
ccgtccgaaaaaaaaaaaaaaaaaaaaaaaaaaaaaaaaaaaaaaaaaaaaaaaaaaaaaaaaaaaaaaaaaaaaaaaaaaaaaaaaaaaaaaaaaaaaaaaaaaaaaaaaaaaaaaaaaaaaaaaaaaaaaaaaaaaaggggggggccgttttaggggtcccaagtttccgcccccggccttgcaacgtattggtttttttttggggcccccaaatttaattcccggggccgggttttaccaccggggggcggggaaaaccccgggggtcccccaatttattcgcttgggaaaaattccccttttccccggtggggttattagaaaaggggcccgccccgttcccctttccaaaaattggcccaccctgatggggaatgggccccccccttttaccggccctttaaccccgggggggggggggtttccccccagggggccctttacttttgccaggcccttagcccccgttcttttggttttttccctttcttttttccccactttggcgggtttcccccgaaaagtttt

SEQ ID NO: 14640 - DNA, 531 bp, Gossypium hirsutum
  Clone ID: LIB3829-035-Q1-K6-E10
caaaagccccaaaacacatcaaactgaagctgccagcaaagtcacctccatccgctcccgattcactttcatcttggtatctttcgtcggctccaccgtctcagatctctggtccaactgtttcggcaagtgcttctttactttatcgatggctattttcaggtttctttagtttctaaaacgaagaaattttcgagtaatggctcgtctgcctttaatagtacaaagtgtgaggcgcaaaagaattggttttgcattgacaacatggttgcaaatgtgtacaattggccaattacagctaattctacagacccaaggtggaaatggttcaagaattgctcaggagctttagatggaacccacatcaagattagggtttcaacagttgataaacctagatatcgaacgcaaaaaggttcttcgagatgccattagtaggagacatggactaaaagttcctcatggttgttattatctagttgatgctggatacacaaattgtgagggatttattgcaccttttagaggaca

SEQ ID NO: 14641 - DNA, 534 bp, Gossypium hirsutum
  unsure (1)..(534): unsure at all n locations; Clone ID: LIB3829-035-Q1-K6-E12
cccacgcgtccgaacggcccatttcatttgccattagccacttgccggcgatatattctcggagattgcccttttttccctctttcctttttgcggcaacatgacgacgtcgntncgagccttncctgctgntacagctnccccacttncttcgctcggacctaccgataactttactgctcgctaccactaactttactnaacgaccggnacactatctctttcatctcaaatatgttattggnnctattttgatattngcactaattaattgtatgtgggcttttttattcccagtaaaaaaccaaagcaatgagcttctgttgtttttcccttcaatatatctttctttttttttttcagtttgaatttatcatttatgcatgtcgatttttttaacatatattttgcaacttcttaccttttttttttaaaatttttaggatgattattgttagtatgttattgaaatttgatttgattggtccctttattacttttttggggtaatttggaaattgaagaaattttctt

SEQ ID NO: 14642 - DNA, 525 bp, Gossypium hirsutum
  Clone ID: LIB3829-035-Q1-K6-E2
caactgtcaaagtttctctctctctctctctctctgtattgttgaagttcataagcttttgtatcaatggctgaagtccgtgaccgcaacctgcctcaccaagttcaagttcacccacagtaccgtttcgacaatacaaccggaggcgggtacggtgcaaagaactatcacaggggaccatcaacaagccaagttctagccgtccttacacttcttcccattggtggtacactgcttgcattagccgggttaacactggccggcaccgtcattgggctgatgctagccacaccgctgttaatcatcttcagcccagttcttgtcccagctgccattgccattgccatggcagtgacggggttcttgtagaccggggcgtttgggttaacagggttggcgtcgttgagttacttgcttaacaggctgaggtacgcaacagggacggagcatgtagatttagaccatgcatagagaagggttcaggacatggcagagtatgtggggcaaaagacaaaggaagttggg

SEQ ID NO: 14643 - DNA, 523 bp, Gossypium hirsutum
  unsure (1)..(523): unsure at all n locations; Clone ID: LIB3829-035-Q1-K6-E3
cttgatcccaaaaactgatgaggcgaatgatatgtctttattccacccgatcagtttatgctccgtattatacaaagtaattnctaaagtcattgcgaatcgatcgaatatggnnnnggatatnngnatngatgaggcacaaggggcatnngnnncgggncgnnnnattaagacactgttttggtggnatatgagnngatgcatgctnngaagaggaagagaacggaaaaaaaggggnnatnngctccgaagctcgatatgagcaaagctcacgatcgggccgaatgggatcctatggaaggtatgatgctncaaatgggtcttgatacaagatgggtggaacttattatacattgcatatcgnnggnttcatactttgtaatggttaataaagaggccattgaagtatttattcctagtaaaggattacgacaaggagatcctctgagtccatatttatttttaatacgtacaaaatgtttttcaaccttactaaagattgcaaagcaggatggcataatga

SEQ ID NO: 14644 - DNA, 534 bp, Gossypium hirsutum
  Clone ID: LIB3829-035-Q1-K6-E4
cccacgcgtgcgcaaatactagaactttgtcttctccttccttcgattgccaaagtatgggccgctctattgaccagtcggggaacaaaaagagaatccctttccacaaccaagcaccggaaacccattctaaaagcaaagagcaaagccctttcacatgcccttgcttcagccacgaacgcgtggacaacgtcctcaaatagataagttgctgctcctacaatttctcctttagaacctatagccaaaattgttgttgtaaaagttctagagtcactttgaaaggttgtgttaaaatttaatttgataaaacccaaatctggaggactccaaaattctttcggaagagatctacaagaaactcccagctcttggcatagacttatttcttgaccatagcctcgaatgaaacctaacagatcctgcaaagaaaatttaacaccttcatgaatcaacttatttcttctgtaccatagagcccataggaaaattgcaataagttgtttattctgttcatctgctacaaagaaagta

SEQ ID NO: 14645 - DNA, 525 bp, Gossypium hirsutum
  Clone ID: LIB3829-035-Q1-K6-E5
aggcggttttggatacaacttcgattaccgtattcaattttccgagtttttctttacacggctgaaattcaacaggaaaaaataataaatcgctactttccattttccaatcttgttgaacgctgagctgagttcctttcctttcatggcttcctttcgcaggctccttcctctttgctcttccctaagaggaacgaggttttcttcttctggagtatatgaaagtttgttttctttctctctctctctgtctcttaaaatttatgtccacggtttgattttttattgttctaatctaaatctgtaaatttggacttccaagtattatatttttattttttgtgtttccttggtactgattagcgagtagttgaattatttgtgatttatattactattgtattttacaattaaaaaaaaaaggatttggagcaaatgtatgtggctacagcaagtttacatcctccgtgcatacgatatccaagtttgaggaaaaaataaagcgtgcagaagcagacgcttcgg

SEQ ID NO: 14646 - DNA, 527 bp, Gossypium hirsutum
  unsure (1)..(527): unsure at all n locations; Clone ID: LIB3829-035-Q1-K6-E6
ctgttctactggtttctggactgtctgattaatctttcgattaaattctccatttcttttttgaaattcatcaccgatggcgaccgccatggtcgaagattcgagcttcgaagaggaccagttggcttcgatgaccaccgaggacatcgtccgagcttctcgtcttctagataacgagattcgaattctcaaggaggagatgcaaaggacaaatctcgagttagattcgnacaaagagaaggttaaagagaatcaagaaaagatcaagcttaacaagcaattgccttacttggttggcaacatcgtcgagatattagagatgaatcccgaagacgaggcagaggaagatggtgccaacattgatcttgattcacagaggaagggtaaatgtgttgtactaaaaacctcaactcgtcagaccatctttctacctgtggtcggacttgttgaccctgataagttgaagcctggagatttggttggcgtcaataaagacagctacttgatattggatactctgccatcta

SEQ ID NO: 14647 - DNA, 534 bp, Gossypium hirsutum
  Clone ID: LIB3829-035-Q1-K6-E7
cggacgcgtgggcggacgcgtgggggaaaacaagaaaagcagagccgatcactttttgctagctaagctactgagggagttattggtcttcagaacagcttgtgcagtagctaataatatcggtatatattatataaagttttatacatgactttctaccctacagctacatatataagcaagtaaaaataaatatggctcgctctgattcttcctttaagctccttggtgcttatattttcgatggtctttatgtctccatatcaaggagaggttacgtccggtgcaccgccggcagcagagacggctagctttggtaggcctggggcgatggggaaagtggaacgaagagatgctatgaaagagtcgtcgtcgtaagagacaagggcttattcttgagcttgggcgcctgaccctgttacagggtattaccggccagagaattgtggggctgagatcgatgcggcggagctacagaagatggtggtgaatcacacggttagatcacagtagaaacttgccaccgaatgtgat

SEQ ID NO: 14648 - DNA, 524 bp, Gossypium hirsutum
  Clone ID: LIB3829-035-Q1-K6-E9
gttttgctttgcttatcatcatcaaatacactttcttcttcttctcttcatattggttttttcccttagaactccacgacacatatccaaggagttggggaaaaccctcacacaaattctctctctaaatcttaaccgaaaaggtctccaaaaaagactaccctttttgcccatttactctccttattcaacaaattcaggatgacatgcccaaaatagtagcttatttatctcttgctttcttcatctgcttcaagtcatggctggcttagcacctgaaggatcccaattcgatgctcgtcaatatgatcagaaaatgagtgatttgctccaaacagacggagatgattttttcacttcttatgatgaagtttatgacagtttcgatgcaatgggacttcaagagaaccttctgaggggcatctatgcatatggttttgagaagccctcagcgattcagcaaagaggaattgttccattctgcaagggtcttgatgtgatacaacaggcacagtctgggaccg

SEQ ID NO: 14649 - DNA, 528 bp, Gossypium hirsutum
  Clone ID: LIB3829-035-Q1-K6-F10
ctgcctttgagctctctttggagcctcaccgacgacgaaatcgaaaaacgagaatggaaccgagacaagaatagtccccagcagcaggacgagaacgagggcttcctccacaacttttcacagaacaagaagaaggccattaattttggcgcggagctggagaaggatctcgatgacctggacgacgaggatgcagaggaagaagaagctagcgcctcctcgagtaaacctgctaagccagaggattataatgatgaagagtgggagattaagtcttccattgggagggactgtactcttgattacgaggaagaggaagatgcatacgataaagtggcagttggaagggataagaatggagatcgcctttacatgaaagatgtgaatgactatgacatagatgcggattcttgcaacacacttccaactacgttcaaggatttcagtagagatccacgtgccaatcacatcgctgcaaaacttaggctcatggaagatgaagaagctactaagagaaggcttgaagaa

SEQ ID NO: 14650 - DNA, 510 bp, Gossypium hirsutum
  Clone ID: LIB3829-035-Q1-K6-F11
ctcattttctgtcttccccaaagtgccaaaaaatccctggggtaaaggaaggaatgataagatcatctatgctggtgatatatggtctatcggatatcgagctaaccccctcacgatgaactcgggtgccgcgtgaagcaatataacaaacgctgcctaaactagacatattactacaagctcatgttggtacggatgattagtagtgctttggtgggacattgatagtgctaattatggagggtacgggacatgaattcaggattgacggaaatgtcacattgtgcgtacttggacagtgctcaataggcaaacggcatcgtttgaaatggcaggacgaacagtttcagcaacaacaacaacaggacactatttcagcagagtaagctggaggcgttgtctagccaaaccaaccacgtacaaggcttgcagggcgggatcatggccggagccagcggtgactgggcgctatcggacatggttatggatgactacgagaagcctgaccct

SEQ ID NO: 14651 - DNA, 519 bp, Gossypium hirsutum
  Clone ID: LIB3829-035-Q1-K6-F2
ggaggatcttcatcgttattttgattacagtgcaggaactgagggattcgattttgttcctcctgctggttgcaatagttttggaagatatgagattgctctgttatgtttggggatgatgcactttcactttgggcatcctaagaaggctttggaggtcctaactgaagctgttcgtgtcgcccaacagcacagcaatgatacttgtctggcctacactttagctgctatctgcagcttgttgtctgagattggtttctcaaccactagtggaatacttggatcgccattctctcctatgatcagtgtaggaacttctttgtctgttcagcagcaattgtttgttctcctgaaaggatctctaaagagagcagagagtttgaaattgaagcaactggtagctgccaatcatcttgcaatggctaaatttgatttaacgagacctctgctgtcatttggtcccaagacttccatgaagcttcggacatgcccaattattgtttgtaaggaactacgatc

SEQ ID NO: 14652 - DNA, 441 bp, Gossypium hirsutum
  Clone ID: LIB3829-035-Q1-K6-F4
agcaaattgaagaatacgctgaaatcttcaatccaaaatgcctaagcagattcatgagatcaaggacttccttctgactgccagaaggaaagatgcacgctctgtaaagatcaagaagagcaaagatgtcgtcaagttcaaggtccgctgctccaagtacttgtacacactttgcgtgtcggatgctgagaaggctgacaagttgaagcagtcccttcctccaggtttgagtgttcaagacctgtgaaaatatggcagccccgggtttgtcacctgatttataggtgatgaaagctaggtttttagttttgggtttattgtatttctggtcattctgcaacagtgagctcaattttctgtaattggatctatgtttttttgttgattaaggattttagtgatatatgcacttttcaattacaatgaatgttctttttaatg

SEQ ID NO: 14653 - DNA, 526 bp, Gossypium hirsutum
  Clone ID: LIB3829-035-Q1-K6-F7
cggacgcgtgggctcacaccgtgccaatctatgaaggatatgcccttccacatgccatcctccgtcttgaccttgcaggtcgtgatctaaccgatgccttgatgaagattcttaccgagagaggttacatgttcaccaccactgctgaacgggaaattgtccgtgacatgaaggagaagcttgcttatgttgccctggactatgagcaggaactggagactgcgaagagcagctcatctgttgagaagaactatgagttgcctgacggacaagtcattactattggagctgagagattccgttgcccggaagtcctcttccagccatctttcatcgggatggaagctgctggaatccatgaaactacctacaactctatcatgaagtgtgatgtggatatcaggaaggatctctacggtaacattgtgctcagtgggggttcaaccatgttccctggtattgcagaccgcatgagcaaggagatcactgcacttgctccaagcagcatgaagattaaggtcgttgc

SEQ ID NO: 14654 - DNA, 523 bp, Gossypium hirsutum
  Clone ID: LIB3829-035-Q1-K6-F8
ctacagttcccggcgttcatgacgcagttcccgtcgacgatgactattccgtcgtcacttttgcttccttctcaatggccccaaccccacaacgaagagctcctcctcgccatggaagaatctaatctcgaagacaagttgaacgaaatcagtgatactaacagaaatttggttgtgattgggaagacaactgctgataatgataaagaagacgataatgatgcggatgatgatgatgctgacaatgcagaagaatctgagggtgaggagtttgagcaagaaactggttgaaaactatactctctccggttgtcttgcttacctcttatttaaaaatcccagtcgttagtctctgtaaaaggtctagtaaagacttgagaattaagataaccattaatgctatgttatgttcccacaaagccagtttcaggcatgtagttcttgcaagcttcaatcagagtattcgatttagattttcaatttacacatattttgaacccttttttagtcatggaaaacgatt

SEQ ID NO: 14655 - DNA, 384 bp, Gossypium hirsutum
  Clone ID: LIB3829-035-Q1-K6-G1
aaaaaaaggaagagaaaaggtttttcgctctagagagtacccagaattggtcattccccccgccgtggctccgccgtgccggccaccgtgaaagtcgcccataggtacacgggcggtggacatgacaagggcggtggctgcaggctatgggcggtgctgagtcagaagaccctaggtgcggcgcacctagggtttgaaatgttgctgtttttgttatggtttgggtcacattgctttgggcctagtgggtttagggttaaaattaatttttgagtctgttttgaaattaagtttagggttaatgggtttttagtgggcccgcaaattgggcttgtacaactgacatggtgcattatgcaaattgagaaaagtgtaacaatcgac

SEQ ID NO: 14656 - DNA, 522 bp, Gossypium hirsutum
  Clone ID: LIB3829-035-Q1-K6-G11
gggttcaagaggcttgtgagactttcggttgtttcgaggtggtatatgaaaaggtatcgactaaactccgagaggatgcgtttgggttgatgaaagaaatggttgagctcccagtggagacgaaacagaagaataatagtcccatgccttaccatggttgggttggaccatgcaagcaggtttctgtgttgtatgaaggctttggagttggagatgcctccaactatgactctgttaaaagttttgctcaacttatgtggcctaatggtcacccacacttttctgacactattcataccctagggacgcaaatggaggagttgaacaagttaatttggttaatgttaattgatagttatggattaggggatgactcattgaagatgaactacacaacgttggtgcggatgatgaaatatatggcccctccaccaggagagtatgaaagaggactctttgctcatactgataaaccagtaagcacactcatttgtgaggatcaaatttcaggactggaaattg

SEQ ID NO: 14657 - DNA, 456 bp, Gossypium hirsutum
  Clone ID: LIB3829-035-Q1-K6-H1
gggagggccggggcaattgtagatttaattgctgtcgctactgccaattgataattcaagttcaatcatactacaatcctcgggtaagatatggtctagttcgtaaaattgtacatccatagtagttagttttctatattaaacctcatggagtttgggatgctgaaaatctggtttcaagtataagtgtgggggttttccaagtattctttttcctttttttcccctttacgaacatgatatacccatgtggttgagttattttttttattgaaaaccacgtggattagaattagataattttaataaagtttactaaaatgcaactcttgttttccccctttgaatctgtttgtcttcttgtagccatcctcctataaaacaatggaatagctaatgtacaaataaattgatcttttggtgaaactatgcatgtatccgttttattggatgcat

SEQ ID NO: 14658 - DNA, 531 bp, Gossypium hirsutum
  Clone ID: LIB3829-035-Q1-K6-H4
gagtgctcgtctttcttcagcttctaagagatatcaatcggctcttcaattacgatctgatatgtttatggggtttgaagaaattgatggagaagatgaaataacgcagaggagtttcgatgccctttttgttcagagtatttcgacatcggtggcttgtgttgtcacattgatgatgagcatccagtggaggctaaaaatggggtttgttcagtctgtgcagtgagggtgggcgttgatatggttgctgcatataaccctacaacatggaaatatatttaagatgcatcgcaagatgaaatcacgtaaaggtggatctcattccacgctttctcttctgaggaaagagctgcgataaggaaatctacagtccttcttcgggggttcttcttgtacagtgtcttgcaattcaccccctgatccgtagacgtcttcatttattctacccatggttgatgactttgttagtgtccagcctaacttttctcgtgaaacaggaacaactaagaaaagttcagacgtgaataagtc

SEQ ID NO: 14659 - DNA, 525 bp, Gossypium hirsutum
  Clone ID: LIB3829-035-Q1-K6-H5
gactcttccgtcttcaaacacttcgaatcgttttccaattactctgacaagatgcaaatctttgttaaaaccctcactggcaagaccatcaccctcgaggtggagagttcagacaccattgataatgtgaaggctaagatccaagataaggaagggatcccaccggatcagcagaggcttatctttgctggcaaacaacttgaggatggccgcacgctagccgactacaacattcagaaagaatccacccttcacttggttcttcgacttcgtggcggcatgcaaatctttgtcaagactctcactggaaagacaattaccttggaggttgaaagctctgacacaatagataatgtaaaggcaaagatccaagacaaggaagggatcccaccagatcagcagaggcttatctttgctggaaagcagcttgaagatggtcgcaccttagctgattacaatatccaaaaagagtccaccctccacctagtacttcgtcttcgaggtggcatgcaaatctttgtcaaa

SEQ ID NO: 14660 - DNA, 529 bp, Gossypium hirsutum
  Clone ID: LIB3829-035-Q1-K6-H7
tgacttggcagcttccaatgatgatggaaagttcctccttgctgcaaggaagtgccgccgtcctacctgcacagattatatcatctcattaaattgcaatgatgtgtcaaaaggaagcagtacttacattggaaagttgagatccaactttttggggaccaaattcacagtctatgatgcacaacctccaaatgctggagcaaaagttactaaaagttgctccaccaggctaattaatatgaaacaagtttctcctcgtgtcccagctggcaactatcctgtagcccacatctcttatgagttgaatgtcctgggttctagaggtccaaggagaatgcactgcgtcatggatggcatcccagcatcttctattgaacctggaggtgttgctcccacacagactgaattcctacacagtaatctggataccttcccatcactgctgttctttagatcaaaatcaacccgttcagagagtttccagtctggacctttgtctgaccagaaagatggaatgctagtattgagg

SEQ ID NO: 14661 - DNA, 521 bp, Gossypium hirsutum
  Clone ID: LIB3829-035-Q1-K6-H8
cgccgtcctcttcatttattatcatttttcattgttttcgtttggtttagggtttcatttttctgtttaatacgggatggggaggtatcggagccggagcaaaagctacagtcctcgtcgtcgtagccggagtcccactcgtggaaggaagaggtacgacgatgaacctcgcgatcgccagcgatctcatcgtgaccaccgtcgccgctccccactcccttctggtttgctcattcgcaatctccctctcgacgctaggcctgaagatcttagggttccctttgaacggtatggtccggtgaaggacgtttatctgccaaaaaactattatacaggggaaccacggggctttggttttgtgaagtttcggtatggtgaagatgcggctgaagcaaaacaacgaatgaaccatcaagttattggtggacgtgagataagaattgtttttgctgaggagaatagaaagactccccaagaaatgcgtatgactgcccgtgtaagtggtcgagataggggaagca

SEQ ID NO: 14662 - DNA, 681 bp, Gossypium hirsutum
  unsure (1)..(681): unsure at all n locations; Clone ID: LIB3829-035-Q1-K6-H9
tttttttttnnnntnnnngggggggggnnnnnngggggggccccccgggggggggaaaaaaaacaagngtttttttttgggaaacccggggggggggggagagaaaaaaaaaaaaaaggaggggggggaaaaaagattgtatttttgggggggaaaaaaaaaaacctccagggggggggggggaaaaaaaaaattttggggggggcccaaaaaaaggggggggggggggggaaaaaaagaaaaaaattttaaaaaaaaattntgggggggccacggggggggggggagaaaaaaaaacccctctctttttctggcaaacaaaaaaaaaaaaagaagggggggggaaaaaaagaaaaaacacaaaaaaaatttttttttttaaaaaaaaaaaaaaaagaaggggggaaaaaaaaaaaactggggggggggggggaggggggggaaatttcctccccccccaaaaaaaaaaaaaaaaaagggggggggggggggtggggttttcctcacccccggggggggggggggggggggtgataaattgggggaggggggaaaaagcgggggggggtgttttcccaacaagaagagagttnaanaaaaagtagaaaaaaaaaaaaaaaattgggggggggggaaaaaaaaaaaggggaagaattttttttgggggggggggggggggag

SEQ ID NO: 14663 - DNA, 472 bp, Gossypium hirsutum
  Clone ID: LIB3829-035-Q1-N6-A1
ggtcataaccatattcattgcaaggccatatgatacaaaagcataccccaaatcaccaatttatttgccaccaaatccattcccaaatactcccctaaaacctgatcacaaaaccggttttcactcatgagaaagacaccgaaaatgatcttcatcgaccagggccatttattcatctcgggactaaagctacaccactccattttaaacaaaaccccaaaactcagttttccattttcgaaaatgtcaaaaggctgctccaaagcttccttccttacaccaatgaaagcttcacaaaattcctgaccggaatttgaaacaaacataacctttgcaatggacttgatatcaggaattacatgttcagggaccaaatcaacaattttttcaccacattcctcgctacaaaagtttttgctcaaagcttccttcgctgactcattatctaatgaaacaacagactccttgaaaa

SEQ ID NO: 14664 - DNA, 535 bp, Gossypium hirsutum
  Clone ID: LIB3829-035-Q1-N6-A3
atctgaagaaatatggaatcatatgttcaattattcaggcttaggacctgatggctcccccaaaatgagccatcgagtcgatgaatgatgcaacaaacaagtacattacatgaatgatggttgttggtacttaaaattattagtcagtcacctccatgtctcatccagcacttgactacccttccatccgaacttattattatttcccatcccatcctacccacccaaagtaattaatgaaccgtcattacgatctaggaccaaggcgtgaacacttccttcgaccatttttgctaagcccacaaacacacgtctccagaagctcgtagtcctcctcccagaataaaagggatgccttctccggattctgcaatagcatctttgaggtaaggaaactggcaactgtccatgtctggtagagccgggattgtttgcctatgaaccttccacttcttgtgtcatagtattcaggccactgatccactgctagcctttcctctaccaaagcaactgctttttgtgccaattctggctt

SEQ ID NO: 14665 - DNA, 530 bp, Gossypium hirsutum
  Clone ID: LIB3829-035-Q1-N6-A4
atctgggaatgttccgagttttctgatttctcactctttagttcgtgctcgatacaaattccgatctagaagagtatgatccacaatataaatatatataatatatacctttattgacgttccctccgaaaaattccaggctgacatgaaaaagaacaagcgacattcactaacaaccaatccaaccacattgaaatttggggttgctcacacggtaccgtctccttttcagctttgtctagcctgagatttcaacgccaatgttgcgagtctaggtggcaattcccaaaacacttggatttgattcatgatcccttttgagagccgctggacgagttacgggcttcctgaaattggatggtgcatcgtctttgaagcactctaagcttgtccatcagttccagaaatgttggccgactttgaggatcactgagccagcaactctcaattatagaagcccacagtggatctaaatagttcggaatttccagccgttggttcatgaacccgacagctccaatcacctgtat

SEQ ID NO: 14666 - DNA, 523 bp, Gossypium hirsutum
  Clone ID: LIB3829-035-Q1-N6-A5
aaattaaaactgggtggccaatctttttattgtcacaactatttacccttcattaatacaaacattaaagtcttaagcataatcatatcaaacataacattaccctaattaaaactttttaatttctaataaaagagctgaggctgttgttgatgatgtgtcacaaggtcatcaagcatccaaaggtccactgagtcaggctcagcacttccactcaactcagttgttgtctcatcaggctccaaacccaggaacgactccaggctcgagatttgctccttcagctccatctcgctttccattgcttcactcggtctgtaaactccattctcgtaaccaaaacccataaaaagttgtggggttggtgggctctttgtttcagaactcggcggagtcaactcaggagccatcatacaccttttcttagcaggaggctgagttaggtgtggagtttgagggaagttgagcttggctttctccccacggatgcgcttggcggcttcatcgtaggctcgagccgctt

SEQ ID NO: 14667 - DNA, 497 bp, Gossypium hirsutum
  Clone ID: LIB3829-035-Q1-N6-B1
attataggttttatttttttatttattatgtgtttgttataatttgtttaaagcttttttttgtttatcaacccctctttgtttaaaggactgccgcaacaaacacatgaaacatgggagctttaaacaaggaaaacggggcatcagacaagcatacagcactacccccatatatataaacagaaaggggatgccaaatgccccaaaagaacaaaatcgtgttaacttactccaaaaaagcccctactttcccattgtgaaaaaaaaatggtaccaccaaaatacgccgtgccctttatggaaccatttttgctacaccaagggcctgacctgtcgccaggaaaaaccacatcaaaaccttttgggggagaatactcaggggaaaaagggccaatactcccagaaccaaagcgggaacccaacactggggacaccaccaagagcacgatggactcttaatttgccggagcagccaaaaagacacaacccttattcaa

SEQ ID NO: 14668 - DNA, 530 bp, Gossypium hirsutum
  Clone ID: LIB3829-035-Q1-N6-B2
cacttgacatgtattcattccaattgtatgataaaaaaaagtatacagaaaagagggcaaaacagataaacttatgaatgcatcatactttaacaaattgactactccaaaatgggtaacaaacaattatacaaaaagcagcagctgagagactaaatgcaacccagccactgaatgatatgtatatgcttaaagatatatatgccaacttatgctgaccaaaaaaaaaagtgaggaaaataaggaaatcaaaactaggtgatggaaaggacagtggtgaaaaatgaaatgcagcactttgagactgtttccaaagcgctgcacatctttcaaccctagcctcggtcatccattccaatgatggatatttacttggagaaaaaacaaaccaagggcaaaaatgatgtttgtcttgaaacaagagcagtgagaacactgaagctaccggactagttagccaccggtttgatgtcacagttactgaaccctctcttaattaatgctcctccatgacttcattgtgattttca

SEQ ID NO: 14669 - DNA, 498 bp, Gossypium hirsutum
  Clone ID: LIB3829-035-Q1-N6-B3
aattgaaaaacaattctgatttttcatttcaacaaggggtttcatgtgtacaaagtttaaaggtttaataacaaaatgaatctaatgctttcctctcaaaaaaatgaatatcctatcctgtttttaagtccaaaatatccaatcaatgtttatctacaataaactccattgaaagaacctcccaccaacacaatcaaagaattttttctgccaaacctcaaaaggtattctacaaactgatagaatgaacaaaaaatgtcaaatcctactcctgcactgttacattcgatacgtgtaaaatcgataagcagcagcttcgagactcatcaaatttcaatatctgcacgggttttgattggtttgagcttgatccctaaaccctcaggggagaagaagttcaggagctatgcaggaatggcttgatggacttgaagggtttgaaccattgcttgatgatgaaacaaaatgtggttgtctttggaaaccaaatcccattaa

SEQ ID NO: 14670 - DNA, 509 bp, Gossypium hirsutum
  Clone ID: LIB3829-035-Q1-N6-B4
accacaaagaaacatctctcacatataatcaacattttacaaaatggaacatgcactttaatcaccccagatgatttaaactcgaaacacagaaaaaaattaaaggaaaaaaaacttattctacaaatgaaacctatagagactcatatgaatgcagcagcagcagaacaaccaaaagaatgataaaaaaagaaaagaaaaaacagcaatggtttcttttgtccttccctcaactagatgccagaactctctgattgttgtaaaacacatctacaaaaacacaacaggaaatatgaaattttagctggtcggacgtacgttacgggaattataaaaaataatcaggggttctacgcgtggtctctggttcgatctgacgtggagctgggtcaaactgaagaaaactttgctccatattctccccaatctcaagtattgcagccatattcccacaacggtagcagtaatttggtgcactgaacactgttaccacattcttgtcctgggac

SEQ ID NO: 14671 - DNA, 532 bp, Gossypium hirsutum
  unsure (1)..(532): unsure at all n locations; Clone ID: LIB3829-035-Q1-N6-B5
aaacanaacattttctattataaaaggaacaagtttcgtctctaacaaaagcattagaaagctttaaaaaagaaaggcacaatatggcccaacagaaaacaaaaagaaaacgaaatacccagactgatccattgtcaaatgattttattaccactttttttttttccgtcccaattccaaaattcaagaattgggttattctcccaagtccaaaatagaccatccttcagctcatttttgcttgtcttacattctagccttagccacaaccagattgccttcacttccaatgttccctgcacctggtctagtccatgtttccttgaattgctcctcagtcacccctttgcccatggctgctgtggatgatatacctccttgaactgtcttgagatatctatcataaaagttggcacctgaccatttttggtgagccaatgtgtccactccattgttcctttcttctctttggatcttctccacatacgctagcatccccctcctggcgaaatctctcgcaaatgtgtcggtc

SEQ ID NO: 14672 - DNA, 472 bp, Gossypium hirsutum
  Clone ID: LIB3829-035-Q1-N6-B6
cccatcaaaacccctctttatgataaaataatcttaaaaaacagtcccaataacaggggttaaaggttggggcaatgcccacattaatcaacacccgcaaattaagttaaacgaaccgccaatccagggttaaaacataatcctaatccttaatcaaggggtggtaaaatggagatcaaaccctccccatgctttaaaaaaaaaaaactgggccccatgcaaacatttttagtttcaaaaagggatctaaggaaacattggctttttatttaattaaaacttaaccctgggctacttaattttggcggagttattgggcctaacgggggggccattttaggcgtaaaataatttttccaatctccaaccttccctttccaaaaaaaaattttgttttgaatctccaaattcccttgcccttcacgaggtatcccacttttattcacttccaagtggcttaaattctcaaaac

SEQ ID NO: 14673 - DNA, 525 bp, Gossypium hirsutum
  Clone ID: LIB3829-035-Q1-N6-C1
gcaaattaatagcttaacgcagaaattcaaatcctcacacaacaagtataaattaaatttgtaaaataaaataataataataataacctaattaatgatttactgagtctgaaatcatcaacacttggaaagctgtacataaatatggaaatcaagtaaacagccgaagacgattagtaatcctttggcggcatattggacaattcgacacttttgacccacattccctgcaagtcgtatgcccgcaattaaaggccaagtcctttgtattcgtaaggcatattgggcatgtagcctgggtctgatcatccgcaggtgatgatgatgagacattgcttggtacacgctcaggtggagcaggtgtaggtctacggtaggaaactgggggaggccgtggaactactttcttggcttttccagttcgttgtccaagaaagccaagttctgtcactgctttgtactgtaacgggatttccatgagagcagcaagcgcaaaagcagtttccttctcttctggacttatat

SEQ ID NO: 14674 - DNA, 522 bp, Gossypium hirsutum
  Clone ID: LIB3829-035-Q1-N6-C2
gaagaaagatagcatgtataatagtattatttttgttgaaagcctgaaagaatgcaacaacagtggtgctataaataggaagagtaagtccaagttcacccccaagttgacaaattcttcaaaccttaaacgcacaagttgaatttatttagatgatgatactcgagcttgatgagcaaaacaggcttcccacttcagtttaccttggacttggatggtgacggaagcaactgataacaggagatgagagacgtagcaaatccaagagcccctgttacacgaggggtgactttcttaggtgccaattgaagaaggccaactgctaccactatatccagtcctgctttaacaagagctagagtcctctcatttgatttttggagcttggcacagtattcctcactcttgtacttatcactgtccttaagattcttttccaactttttcattgatttagatagccttctgagctccccaagctcaaccaaggtggtacagattgaagaacccatccaacagaaa

SEQ ID NO: 14675 - DNA, 540 bp, Gossypium hirsutum
  Clone ID: LIB3829-035-Q1-N6-C3
agagcccccagctttcatgttttcacaattataccattacagtacagtacagtacagtacagctgatagtaaacaagatttaaacccccaccaaccactaccgccaatagcggcagggggaggaagaggtataaggtaagatagacaatatgttgcctctctcccacaacatattctacagccccattgcattacctaacaaaacataaaggagtaagaagtgacccctattttttggttagaatttcttcaccaatgcctactaacacaatacacacaacttcgactccttcgacaccttgtaaaaaccttcctaacgtataaaacgacaatcactaatgttgctagcaaaatataagtaaaacccaagaaagaaaaaaattgtccctatgaaagaaagggaagctctgctactattagacgctgaaactagtagaaataaataagtgtgtactcaatcccatgcactggcaacgtttgcgccgtagcctccaccatatccacctgaattgttgttgcctccactgtagtaatctgaac

SEQ ID NO: 14676 - DNA, 462 bp, Gossypium hirsutum
  Clone ID: LIB3829-035-Q1-N6-C4
acggggaaaaccccataagggggaaaaaaaccgggggaaaaaaacccaggggaaacttttcaccgcggaaagggaacggggaacaaattggacaaaagaaccgcccggaccaaacacttttaaaaaaaaaaccccaagaagaaaaaccctaaccaaaaaaacccccaaaaaaaacacgcccaaaaaagggggcgcccaaagcccccccccttaaaaacccaaaaaaccagaaaaacgcccaaaaaaaaaacaagggttcccgaggctaaacaaagccgacaaagggaaacccccaaaaaaaaaaaaaccctaaagaaatggggaaaaaaaaaggggaaaaattttcaaagggtaggaaaagaactaaaaccttcaacccaaggaaaaaaaaaggcccaaccaaaagcccgaacaactaccggggccaacaagagaggcccacgcacaaaaaaaactcccaaa

SEQ ID NO: 14677 - DNA, 516 bp, Gossypium hirsutum
  Clone ID: LIB3829-035-Q1-N6-C5
cagcagaatcaaatcattaatagcattagaaaacagtattaaactatagttgtacaatctgtctttagggatcacccctagctaggagtgaattacaatatgaaattaacattcatatcatgaaaatccccatccaactctctgcaagctaaagaaatccgaccccctataagtaacaaagataccgactaagatgtgggactctgtacgataacattaacgtcaaaagtaccttgaatgtacttgctgtagctaagtatgtatatgttggcatttgatcattccaaaaaggaagaaacaagaaagggtgattagttcatcgcagggagtagagcacggagtcgaataggagtctttgatgggcttactcttatgggcaatgatcccagaactgcaccactgcagttaagagctgtgattgcactttctgccattgtaaactcaacaaaagcaatacgagatgaatgatggtagtctcccaatatcctcatgcattgaacctccccacaaactgat

SEQ ID NO: 14678 - DNA, 543 bp, Gossypium hirsutum
  Clone ID: LIB3829-035-Q1-N6-C6
aagcagaatccaaatagattagttagcatatctgttcatatatatatacactctagataaagagtagagaaatttaatggctaagcagaatgagccacacttttatctaaactagtagcttattttgacaaattatacatagtgaaacataaatcaaagatagagctgcataggagagagtatataccttggacatgatgccaccagttctcttttgcttccatctgatccaactaacaggtaaaaagcacaatgagcatgagcagtttcttctcttcgtgatctcggcaacagatggaggattcgaggaatgttatggtgaaggctgagaagttcaaatggtctgaaaggcttgacgatagtccgagcaggtatgaacagtttatttgaaaagatcattcgaatcgtcttatcttcttaaaaagaatcattttcttcatatgtccaaatgagagctttcatgaaataatagcaaaacaggatgatatatattctgaagatcccattacccacatagcgtttcactatgctcggatcaattga

SEQ ID NO: 14679 - DNA, 532 bp, Gossypium hirsutum
  Clone ID: LIB3829-035-Q1-N6-D1
ctgttgaagttatttgaaatctattgctagtgttacagtgatcccaaacataattgaaactctctgcacactcctctatttctttttttgttgattcacctaaaaaaaagaaaaggacctatattacatcctcttctaaagatccatacctctcttgccttgtccctgtgatttttaacataaaaaactgtagatccttctttatatatacttgtatgtatcatattcatctttattttcggctgcttcacagagggggagatccttccttcgggcttttgttccggatgatatgtacttgcagatgactttgcaaagcaaatgttaagggggggaatgtaaaagggcttgtttatgtataaattagcagattgtcaccattggaactggtactctaactatctctctctattatgtgtgttgcttgggggagaaggggcctagatgacagcggaaatgccactagctatggcggaagtgaagggactatctggcagattgagtccgtcactctcctggtcgttgttgtcag

SEQ ID NO: 14680 - DNA, 530 bp, Gossypium hirsutum
  unsure (1)..(530): unsure at all n locations; Clone ID: LIB3829-035-Q1-N6-D2
gaaacaaagctattcgttaaaggaaaagaagctcttagcaaactacaggctattagttaaaaataaataaaaaactgaaaatgccagatccaaaaattaatcacttgngaagtaagtttacagaatctgagctgccgtattcaacttttcggctaacccgagttgagtcctagcgatgctcgataagtatagtaacagcaattgatcctgtaggctatcattcatgagtttatcgaaagctgggggagatagtttaggtaaggaagctactgtttctgctataaatctacctatgttgttatcggctggaacacggccttccacaacatcgtcaacgtatttgtagacatcgtctatcaaagccgatagccttcccattgtgacttccattccttccaaatcatttggaaatttgtcgactgctgttttcttgaggatgtcaaatccaactcgctcagcttcaaccatacatagatcaagaggaatttcttgaaattgagctgcaagttgtctgtctccaagagctaaat

SEQ ID NO: 14681 - DNA, 529 bp, Gossypium hirsutum
  Clone ID: LIB3829-035-Q1-N6-D3
aacaacaaaaacaagtagtgcttattacagtcaattacatgggagtttttaacataaacagacagccacatcatccccccgaagtttctaatgctgcttttaaatttagaaaaaaacatcttttcatcatcaacaacataacaacaacatcattaaggatcggtttaatggccacttgatcctgaacttttgcacagctccattacaaaagcatgcagtagagaactaatttaagaagccgccgcaccggtgagctgtgccgccctatctttcatctcccgtgccttgctagccaatttcatccccgcactatccaactgatccgccgccggtgggtgcctccccgtcacatacctgtaaatccaggacagaaccgtggcggctgcaacaccgaaaccgccggaggcgacgaaacccgttgctaggagagctgttgcaatgagagcagggacaagaactggactgaaaataacgaagagtggagtggctatagtgagtgcaataacggtgccagctaggattaaaccgg

SEQ ID NO: 14682 - DNA, 534 bp, Gossypium hirsutum
  Clone ID: LIB3829-035-Q1-N6-D4
actctctaatcatataaattatctaagaaagctctcaaggcatgtacatggacaagaaaagtaaaccaggatacagccatacaattctagctctgcttaagcaactttagctggcagtgcaaaatattcttttgacactgaattcatatccaaaactgcctcaccaatattcaacatttcatcaatgctgcgcccattgaatctgcttaatatcaataccttccttcaccatctcataaagtggactcatttccctcaatttctcaacctgtttcacagtaagctcaactgccctatctatctcttcctcagtagtaaaccttccaatcccaaacctaatcgaagtatgtgccatatcctcatccacacccaaggctctcagcacatatgacggctccaaactagcactagtacaagcactcccactagacactgccacttctttcaatcccatcaacaaactctccccttcgacatacgcgaaggacaagttcaagttcccaacatacctcctatccatactcccattcacca

SEQ ID NO: 14683 - DNA, 474 bp, Gossypium hirsutum
  Clone ID: LIB3829-035-Q1-N6-D5
ggaaaaaaatcctggaattggccaccatgatcaagtccaagggtcaaaacgggggcattacaatggcaatatacagaaaccatcacaacataaagaccctaaatccttaaccacctttttccatgggattaaaacaaaatctttaacagatttctcaaagaggggggtcatccaaccattggtcgcttggggcccctttggcgcacttgagctagcttggtcaagggggaaaaccactggtttgaggatttcttggatgcagcaaggataagctccatcacattcccacaggaagaatgcattgaaatcaagggtcgttccagtacatacaagtcaacagctttgttttttggaaggggtgatgtaaagctaaaaccaaaatcgataagggcgagcttattagttccgtttctgatcaacaaatttgaaggggggagggcaccatggacgagtccaccggcgggtaatttgcca

SEQ ID NO: 14684 - DNA, 539 bp, Gossypium hirsutum
  Clone ID: LIB3829-035-Q1-N6-D6
gcaaaatgtggaaaagcaacttatatttaatattatacgtcaatcacaaactaacattcataggaccatcaaaacctgctgatgaaaagaaaataaaaaataataataattcaagaacaacagacaggcaaacaggaatcaaatgtcgaaacctcaattccttcaacctctactcctccagtaggatctctcctaacaatcccaaggattttaaaaagaaaaaatttaaagaaaaaagttggctttatccctccctcttcacacctgagctatctgctgcttcaatgttttcagtgactttatttttgattcacaaatacgccaaaattcagacagtaccctacactgtccggttactatttttcttcccacatcaactggactccaagaccttaaagcctgggatattcgatccccaagctgtgtctcatttggggaagatgccaaagtttccaaaatattgaaaacctttccagctcctccatttctcttaagagacgacaccaaaaggtctatcttattgtcctctgggatcttac

SEQ ID NO: 14685 - DNA, 502 bp, Gossypium hirsutum
  Clone ID: LIB3829-035-Q1-N6-E2
cctaaaaagtagagtatattttatttagagtaaaaaacaagcatgattaagacataaaaaggaacatacatggaattgaagcaaaacccacatcattcaaccacacatgcacgctaacaacataatacaaccccccccccccaaaaacaaaaaacaaaaaacctacatttttttttattcccaaaagccctgttataatgttcaagtccttccaacttgaccttcatgtgcctggttctcaatcttctgcccaacttcctttgaattttgccccacatactctgccatgtcctgtacccttctttttgcatggcctaaatctagctgttcaaaccttgttgcgtaccttagcctgttaagaacgtaactaaacgacgacaaccttgttaaccgaaacgcccccaacgacaagaaccccgtcactgccatggcaatggcaatggcagttgggacaagaactgggctgaagatgatgaacagaggtgtggatagcatcagccca

SEQ ID NO: 14686 - DNA, 543 bp, Gossypium hirsutum
  Clone ID: LIB3829-035-Q1-N6-E3
cgattcaagattttttcaagattatggcaaagggttttgggtagaaaaaaataagacatggagtaagtgggtaaagcttgaagaacaacctttatgaaaatctcctttcccccatgcgaaagaaaatgaacactccaattttcaatcttttgtctcatcctatcgcaaatatatgaaaaaggcttctttcttgcttcgacctaccagagttggtaatccaaataccgttccatactaaaatattttcacacccctaaattgttcacaatctgattgcaaacatgattctccaaagtcgagctaaagaaaatgacagacttatccaagttaattttctaacctgaagccctttcatacttttcaaaaatatctttaatcacctagcctcccctttccgtagcctcaccaaagataatactgtcatcgttaaagaaaaggtgcgtcattgatggactccctctctctcttcattatgccatcctgctttgcaatctttagtaaggttgaaaaacattttgtacgtattaaaaataaatatggact

SEQ ID NO: 14687 - DNA, 513 bp, Gossypium hirsutum
  Clone ID: LIB3829-035-Q1-N6-E4
aaggcacaatatgattgattttaatttgttcaaatatgaacgttcgatgaaataaaatatctaataaataaatcggtaactccggtaatgctccgtaactttattccggtgacgaattcgggttaggggcgttacagatgaagttgattgtcatctttgtaaggaagctccagaagatactaatcatcttctgtggtcctatggtatactacagagtgtctgggcgtcccttcaaatcagaattgctccaatcgatagcactttaaactgcaaaaatcattttgttaatactttctttgcagcagatgaacagaataaacaacttattgcaattttcctatgggctctatggtacagaagaaataagttgattcatgaaggtgttaaattttctttgcaggatctgttaggtttcattcgaggctatggtcaagaaataagtctatgccaagagctgggagtttcttgtagatctcttccgaaataatttggagtcctccagtttgggtttta

SEQ ID NO: 14688 - DNA, 520 bp, Gossypium hirsutum
  unsure (1)..(520): unsure at all n locations; Clone ID: LIB3829-035-Q1-N6-E5
aaaaacaaaatgctaccgcnatacatgcttttctaactagaactagaaggatacaaatagctgccaatgacatagctggacagcgttaaagaactaggatatgcttaacaatcatctaccagtagattggcatgctgctaatcaaagttcaaacatatcaatttgggttaaagctttaaccaatcacctagtaaccaaaaatcaactgtgaatccgatggcagttcatcaccatactagtcaataactcaccatcgatactggtcccaatcttggttcaaaattccaccaaaatttggaatagagataacagatagttccttttgcggcgcaatgtgagatgatgttttacaatcacgtggaagagatacgtgaactcatacccaccccatcatggaacatgaagcataataccatggtncgtccgtaatgacagaaacatcatcgcagtgacagaaacatcaataagcttaccagattttgagcttgaacaaaatggtcctacaatctttttatggcat

SEQ ID NO: 14689 - DNA, 545 bp, Gossypium hirsutum
  unsure (1)..(545): unsure at all n locations; Clone ID: LIB3829-035-Q1-N6-E6
ccttcacactttttaagtgtagattttttttttatcaattgggttcaaaaataaaaataagaaaaccacaaattaaccgaagcaacacattnaaaaccgaaaccgaataaaccgaattaaatcaatctattcgaaaaatgtcattttgctacccctatcttctttgtcatgccttctctaatggcgaaatgctctccagatcatgcgtagtaatttaagcttgccttcttcttagcttgaacctgaattataccttcattgaaatcttcatggttcacctcagttgcatctcggcgaagtgctagcatgcctgcctctacgcaaacagctttcagttgtgctccattaaaatcatcggtcgaacgagcaagttcttcgaaattgacatccggatgaacgttcatcttccttgagtggatctgaaggattcgggctcttgcttcttcagtgggatgcgggaattcaattttacgatccaatcgaccagaacgcatgagagcagggtcaaggatatcagctcggttagttgctgctattaccttaat

SEQ ID NO: 14690 - DNA, 503 bp, Gossypium hirsutum
  Clone ID: LIB3829-035-Q1-N6-F2
caccaaacacaataccctaatcacgatatataatcaacataatttttcaatcagtggggttaaataaaagaccatccatttttcagcaatcatataatcagccttataattaattcatcaaaagggaaggggcaaaacacccgtttaccatactttaattatgctcctgggggctcaggcgttaaaaagggtatcggattggatgggatcttccacatcatgaggatggtcaagagacataacgggattcttgaaaaaagagcagcttcttccctctgttctggttgccccagcttgtcaaatacaagggccatcaagtaaaaagcttcggccattaattcatgatgctccaaagcttgcaactaatttgcagcttgccttaagggatccagcacaagttctggatttctggaaactaaaaagcttggatctgaaaaaaacattttgcttctgaaatataggcccgagcacagagttccaaacctccatggccaaaaatcatt

SEQ ID NO: 14691 - DNA, 470 bp, Gossypium hirsutum
  Clone ID: LIB3829-035-Q1-N6-F3
aaaaaccaaaaaaaaacaaaattaatcataatctcaaaaaacccaaggaatctgcaaaaattttcacccaaaggcccccaataaaaattccaaatccaaaaaagataaaaaggacccggggaaaaaccaagttcagccacaactataaccccataacagggacaggttttttcaagttccaaaacaggcctgaatcaataaaaaagaacccagcttttatccttttaaccaaacaaactcattttcagcacattaaaggccaacactactaccaactcatgaaacaagggtgtcatttaaagacaatgaagccagctgatcagcagctccaccagcttggtgctggggctgggctacagccctcaaaacctccattggttctgcaactttggcttttaaagcttcgggggactcgagcaagggtaaaacccccgggtgggccatctccaaaagcaccccgggaactttgg

SEQ ID NO: 14692 - DNA, 439 bp, Gossypium hirsutum
  Clone ID: LIB3829-035-Q1-N6-F4
cattaaaaagacattcattgtaattgaaagtgcatatatcactaaaatccttaatcaacaaaaaaacatagatccaattacagaaaattgagctcactgttgcagaatgaccagaaatacaataaacccaaaactaaaaacctagctttcatcacctataaatcaggtgacaaacccggggctgccatattttcacaggtcttgaacactcaaacctggaggaagggactgcttcaacttgtcagccttctcagcatccgacacgcaaagtgtgtacaagtacttggagcagcggaccttgaacttgacgacatctttgctcttcttgatctttacagagcgtgcatctttccttctggcagtcagaaggaagtccttgatctcatgaatctgcttaggcattttggattgaagatttcagcgtattcttcaatttgct

SEQ ID NO: 14693 - DNA, 67 bp, Gossypium hirsutum
  Clone ID: LIB3829-035-Q1-N6-F6
gaatagaaaaaagaagaggattactcttaaatgggcatgggaaacacatatacatttaccccggccc

SEQ ID NO: 14694 - DNA, 507 bp, Gossypium hirsutum
  Clone ID: LIB3829-035-Q1-N6-G1
tttttttttttttttttttttttttttttttttttttttttttttttttttttttttatttgttttttgtaaaactaataagaagacaaaaaaagaacccaggccccagaaaaagcccaaggggggggcccacgaaaaaaccaggaacccgaaacctaattgaaaaaaaaacccgaaaaagcaaaaaaaaccggaaacccaaaagggccaaaaaaaggggaccaaaaaaacaacaaaaacaggaacacggggaacccaaggggggccgcacccaaggacagaggacaaaacaccgaccaaagcccggcgccaccgacccaggcaggaacaccccccgggaaccaaagggggaacaccaagggggggacaccgggggggcaaaaaccaaggaaaagaaaaaatctgggacccaaccaaagacaaaaaccttttgtacaccctcgaagaggacgccggggacgacccggaaaccccggaacgggacctggaggggaacaagggaaccgc

SEQ ID NO: 14695 - DNA, 517 bp, Gossypium hirsutum
  Clone ID: LIB3829-035-Q1-N6-G3
gacgtaaactggcataaatatatatatattggaatataaaaataacaaggtcgtacctggggatccaattcaccctatttagaccgtaaaagtcagataataatacaacaaactttacagcatgactctcaattctatcttatatcttacaggcaccaaatgaagagaaacaacgttattgtttctaataataatcatgccatttcctttcttcacatccaactccgcttccctccattatttccattcatcttctttcatcctcaaacctccactggtgagagaaagtaccatcatgtgtgtctcgatgcatcatcatgtaactgtgccactctcacgttggggtcatcccgaatgtagaaactaggagatcgaaagaaatccatgggtcccattccaggcatggcttgctgagtgccatagtaaccatcatggctcgttgctatggtgtttaactgtcccagcccctgaattgtctgttgattcccataataattatcgcgcggtgccattaaat

SEQ ID NO: 14696 - DNA, 484 bp, Gossypium hirsutum
  Clone ID: LIB3829-035-Q1-N6-G6
aaaaagcaaaagccgttttcagacatgcggatttgcagcaccttaatgagaaaattactgaacataaaccatttgacacacttaagatttttgggtcacatgggtaaaatagataaaaatgttttttttataagagaaagggcattcaacattctattaatggcttcaggggcatagacagccagtaatttagcggccactattcaaatttcttgataagggacaagtcatttagcattctctcgatggcatcgtcgtcgggagcccgtcctttagtcttgatggaaggcaccatagcgattgcttcctccacagtttcaggacacaggttgccaaaaacacaaagctcgaattcagctaactgatatctactcaaaattctgatcatcagttaagggtcacaatagagaggcaagttaaatatcctaagaaaagcaatagaatatgcgcaagcattattgtcataagggggaagtactagttg

SEQ ID NO: 14697 - DNA, 454 bp, Gossypium hirsutum
  Clone ID: LIB3829-035-Q1-N6-H1
atgcatccaataaaacggttacatgcatagtttcaccaaaagacaatttatttgtacattagctattccattgttttataggaggatggctacaagaagacaaacagattcaaagggggtaaaacaagagttgcattttagtaaactttattaaaattatctaattctaatccacgtggttttcaataaaaaaaaaactcaaccacatgggtatatcatgttcgtaaaggggaaaaaaggaaaaagaatacttggaaaacccccacacttatacttgaaaccagattttcagcatcccaaactccatgaggtttaatatagaaaacaaactactatggatgtacaattttacaaactataccatatcttacccgaggattgtagtatgattgaacttgaattatcaattggcagtaacgacagcaattaaatctacaattgccccggccctccc

SEQ ID NO: 14698 - DNA, 80 bp, Gossypium hirsutum
  Clone ID: LIB3829-035-Q1-N6-H3
tgacatctatcggactaaggcgagatgcttaacagggcgcaaaacaccgtacggatagctaacagatagactggcaacag

SEQ ID NO: 14699 - DNA, 532 bp, Gossypium hirsutum
  Clone ID: LIB3829-035-Q1-N6-H4
aaaattatcatatgatatgacctgcagaataaaggagaagtggaaaccatgatcaggtctaacagcaactaaaagagtccacatatgcaacataaaattacattcattcgtaccaaccttatttcaacattttcactacacagtaatgaaccgtagatttgcaagtttgcttgccaggggctcttgatcgtcaacccaatttccccgtgggattcagggtcacaattgcattgcagcaaccgatttgaacctgaaaatgctgttttataaaatgtcatcaggcattggggacaacaggagtccttgaacaaactcgcatctttttgccttctattcctgatcctttagtgaaaggggagacgacttcacattcctttctgacttattcacgtatgaacttttcttagttggtcttgtttcacgagaaaagatagggtggacactaacaaagtcataagccatgggtcaaaataacatgaagacaacaacggatcatgggctagaattggaagacaccgtacaagaagaaccc

SEQ ID NO: 14700 - DNA, 535 bp, Gossypium hirsutum
  Clone ID: LIB3829-035-Q1-N6-H5
gaacatcgaattgacgattcataatagcgtccaaagacaaacttaaaatattaaaacaaagatctaatagcagtaacccatgaaagttcgaaaaccacatagctaataataatcccaaataagcttccacacacattatttaaagccaaaaaaggccaccaacaacggcaaacaatccttacttagaaaccaccgcgaaggcgaaggacaagatgcagagtagactccttttggatattataatcagccaatgtcctgccatcttcaagttgcttgccagcaaatatgagcctttgctggtctggtgggatcccttccttgtcttgaatctttgccttaacattgtcaatggtgtctgaactttcaacctctagagtgatagtctttccagtaagagtcttaacaaagatctgcatcccaccacgcagccgcaacaccaagtgaagggtagactccttttggatattgtagtcggccaatgtcctaccatcttcgagctgcttgccagcaaagatgagcctttgctggtctgggg

SEQ ID NO: 14701 - DNA, 534 bp, Gossypium hirsutum
  Clone ID: LIB3829-035-Q1-N6-H6
aagctaaattttttttgttttttttttactaaaaagtgttttcaactttcaacagaatttaactagcagaagcccttacaaattaaaccaaaaaagactttaccactagttttttaggcaaagccaaatttgggtgaaagaatgaaggtctgctaattaaaacaactgttggaactctcacggaagcggggatttacaaaagccacataagggtgcctcttattgttcaaaccacccaatgggggctttgagcttaaaaggccaaaggaagaagccgggtttcttggaacgaggtcccacaaccattaaatcacggataaggatctttaacacaaaagatgcaaaacttgcctagggcctgctaaacaattgcgcagacggtcaaggcaactagtagattgttcaactgtacaaaacctattgtgtgaatgagttccctaacagttttgatattcgggtatggcataagaaacataaggcccaacaaggagaagcatgttcattgttgccttggtcactgtaggaaaaacccat

SEQ ID NO: 14702 - DNA, 521 bp, Gossypium hirsutum
  Clone ID: LIB3829-036-Q1-K6-A10
ctccatcttctcaaaaaattctccatctcaaacgttattttttcctgatggagaagctgaaaatttcaccatctaaaaagcttgaagtgcttttggctgataaatgaccaaaataacctgtcttctcccccttggaaaaacgttctttcctctgctgtgaaagttctatacctatttttttcacattttcgctgtgaaagctccttcctgttctttgttcctcttccgcaggtaatttctagtaaaggtgaaaacggtgtcctccagaatatgaaccaaacaacagccacaatgaagcttccagatgaagcaccaaactttaattttctttgttagatattttatagctttagcaagcttaaattatacaggaaattctttgatggattcgatgtgatctgttttttgtttcatcttgttttttttttaatttatatgaaaagcattcaagtatatcagctttagtttttgctttagtttttgaggtatagaggtaaacattgaaacatcaagagttagtg

SEQ ID NO: 14703 - DNA, 529 bp, Gossypium hirsutum
  Clone ID: LIB3829-036-Q1-K6-A11
gaaagatgcgatcttttgctgttgtgtgtttctgagactcgttaactgttacttacttcctaatgaaaggcttctggcgaccctttgctgcaagttaaaggctcttgtgcttcgctgaggcttgggggtgttaggagctattcagtgttaagcaatgatcaactgagaattaacggggttaaagatgtgattgctgttgcttctggtaaaggtggtgtaggcaagtctaccactgcagttaatttggcggttgccttagctaacaagtgcggattgaaggtgggcgtgcttgatgcagatgtgtatggaccatctgttccgaccatgatgaacatccaccaaaagccagaagttaataatgatatgaagatgattcctattgaaaactatggagtgaagtgtatgtcaatgggattcctggtggataaggatgcaccaattgtctggagaggccccatggtgatgagtgctcttcagaaaatgtcgagggaagttgcttggggagttcttgatatccttgtggtggata

SEQ ID NO: 14704 - DNA, 524 bp, Gossypium hirsutum
  Clone ID: LIB3829-036-Q1-K6-A4
attcgaagcaaaaagaaaagaaaatggcgtctcatgaacagagttacaaagctggtcgagctgaaggccgagctcatgaaaaaggtgagcaaatgaaggagagcatgaaggagaaagcagaagcagcgaagcagaagacaatggagaccgcagaagcagcgaagcagaagacaatggagaccgcagaagcagcgaagcagaagacaatggagacaacagaagcagcgaagcagaagaccagaggagccgccgagacaaccaacgacaagacaaaacagacggcgggagctgctagagggaaggcggaggaaactaaggagacggagacaagcggagggatactgcagcaggcgggggagaaagtgaggaacgcggcacaaggtgcgactgatgcggtgaaacatacctttggaatggcggatgccgatgaggatgaacataattatccggctactattactaggaaggattagggtagcatgtagagttaagatattaataacagttgcaatttgtacgtgagt

SEQ ID NO: 14705 - DNA, 528 bp, Gossypium hirsutum
  Clone ID: LIB3829-036-Q1-K6-A5
cggacgcgtgggcaaagcccaagaaaaatggcttctgcttccgctactctcctcaagtcttcacctattatcgacaagtccgagtggattaagggccaaaacctccgccacccttcggtttgttttgtacggtcacaccctacatcggccgcctttgccgtccgtgctagttcatatgccgatgagcttgttaagaccgcgaaaactgttgcatctccaggtcgtggtattttggccatggatgaatcaaatgctacatgtgggaaacggcttgcctcgattggtctcgagaataccgaggcaaaccggcaagcttaccgtacccttctcgtgtctgcccctggcctcggtgactacatctcgggagctatccttttcgaggagactctctaccaatctaccatcgatgggaaaaagatggtcgatgttcttgttgagcaaaagattgtccctggtatcaaagttgacaagggtttggttccactccctggttccaacaacgagtcatggtgccaaggtcttgacggt

SEQ ID NO: 14706 - DNA, 518 bp, Gossypium hirsutum
  Clone ID: LIB3829-036-Q1-K6-A6
ttaccagccatatttgatatcccctgaaaagggtttgagatctctaataaaaggggtgttggagctggccaaagaaccagcacgtctttgtgttgatgaggtacaccgtgtcctaatagacatagtttctgctgctgcaaatgctacacctggtttgggaaggtaccctccattcaagagagaggttgtggccattgctagtgctgccttggatgggtttaaaattgaagccaaaaaaatggttgtggcacttgttgacatggagcgagcttttgtaccccctcagcactttattagattggtgcaaaggaggatggaaagacagcgccgggaggaggagctgaagaatcggtcctcaaagaaaggacatgaagctgagcagggaatgctgaatagggcaccaagtcctcaaccaggtggtcagcaaactggtggaaccttgaagtcattgaaagagaaatttgggcagggtgagaaagaagtacaggaggggtctgctttgaaagttgctggtgctg

SEQ ID NO: 14707 - DNA, 523 bp, Gossypium hirsutum
  Clone ID: LIB3829-036-Q1-K6-A7
ggagactttacctgagtggagggacaaattcctatgttacaaacccctcaagaaactcctcaaaaacatcccttcaaccccatcgcttgatccccatcatcaacggcctgtatttgctgacgccaccaacactgctgttactcccgtcggtcatgatcatcaacaccctccgcttgatttgcaagattggtttgttagaattctgaatgaggagctcgaaaaattcaatgatttttatgttgataaagaagaagagttcgttattcgctttcaggagctgaaggaaagaattgaacaaattaaggagagtagtgggaagggtggagtttttgcatcagagagtgagtttagtgaagaaatgatggatatccgcaaggatcttgtcaccattcatggggagatggtgcttctaaaaaattacagtgccctcaattttgcaggaattgttaaaattttaaagaagtacgataaacgaaccgggggattgttgcgactgcaattcactcagcttgttcttcaccaa

SEQ ID NO: 14708 - DNA, 521 bp, Gossypium hirsutum
  unsure (1)..(521): unsure at all n locations; Clone ID: LIB3829-036-Q1-K6-A8
tggatccctacaagcaccgtccatcaagggctttcaattcaccattctggactaccaattctggcgctccagtttggaataacaattcatcacttactgttggacccagaggtccgattctccttgaggactatcatctggtggaaaagcttgccaactttgacagggagcggattccagagcgtgttgtccatgctaggggagcaagcgcaaagggtttcttcgaggttacccatgacatttctcacgttacatgtgctgattttctgcgagcacctggagttcaaacccctgttatcttgagattttcaactgtcatccatgagcgtggaagccctgaaaccctcagggatcctcgtggttttgcagtgaagttctacacccgagagggtaattttgatcttgtgggaaacaattnnccagtcttctttattggtgatggaatgaaattccctgatatggtccatgctcttaagcccaaccctaagtcccatattcaggagaattggaggatccttgat

SEQ ID NO: 14709 - DNA, 519 bp, Gossypium hirsutum
  Clone ID: LIB3829-036-Q1-K6-A9
aaggaaacgttgaaaagagtgactaggagcatggcaaagcagccgcaccccgagtctctgcccaccaaggagaagccaaaagcgaaggccaagaagcagaaaaaatctgcagatgaggatggagccaaagccgaagctgcgcctgaggagttggccgtcgctgacggtgggtctcacaacaagactgtagtggttgaacactgcaagcaatgcaattcattcaagacaagggcctttcaagtcagagatggtttggagaaaggtgtcccatgggtcaaagtgttgctcaaccctgaaaagccaagaagaggttgctttgaaatccgagaggaaggtggcgaaacattcataagtctgctggacatgaagagaccatttaaaccgatgaaggagcttgacatggagaaggtaatctcggatatcattgagaagattaaatgaggtgaccatgggtgtgtagacgtagaagcctagttctgattgttttgcctgattaactgtcttgtgttggtaaaaagg

SEQ ID NO: 14710 - DNA, 531 bp, Gossypium hirsutum
  Clone ID: LIB3829-036-Q1-K6-B1
accgattgttgcaactgtgcgaggaggaagatgatgccactagtacattaaaggagccagctgagctgaagcctgagattgaggatcaaagcctaaatcccagtactgtacctgccattcccgaggactattttgtgactgatgacccacaagaacaatcattgcaagggtgagaattatgcggagctactacctaggctaatgctgacataaatgatcaatcggattatcatacatttgatttacaccaagattttgaccatgagcatattctcgatgccaatggcactgaaaatgatgtgaaggatgctaacttcaacatgctgccaaagatctctactccaccatctgctttcatgggtccgaagtgagcactgaggaactgaacaatgcctgctaaaggatctgactggttccaggactactggagcagctacatgctaccctagctctgaatgaagaccttactgtcacaactcctatgatacgccctgacggaattagataaaaggataacttactacttgatgc

SEQ ID NO: 14711 - DNA, 390 bp, Gossypium hirsutum
  unsure (1)..(390): unsure at all n locations; Clone ID: LIB3829-036-Q1-K6-B3
cggaanccaccaacaacggncaacaccccgaggggncaacgagnaaacngagaagggggaggggcaganacacgggggacgagnnaangggaggaagaccggcnncgacaccaaancaacccacggagaagacgggaggaaaaacaaaaaaagacaaaagaaacaagnngaacgcaaaacnggggggagnggcagnagnngggaaacngngaaaaancaccagaaagggggaaaaangaacnggagggcgaagaaaacagnaaaaagaagccgaacgagncnagncncaaangaaagaagnggggaaagcaaagcaaacacacacccagggacacccaaaccccaccgagacagggnnggacngaaaaagaaanccccnngcccaaccag

SEQ ID NO: 14712 - DNA, 525 bp, Gossypium hirsutum
  Clone ID: LIB3829-036-Q1-K6-B4
gcgggtgtttacattcatgactgcactgagagacttggctgaggagagtgggttattcctgaaaaagcttgacaaaaaattggaaagaactctcttgcattcatatcgcaaggatttgacttctcaagtatctgctgaaactgacccagtttctcttctgccgaaagttgtttccctactttatatacaggttcacagtagagctcttcaagctcctggacgggcaatttctgttgctgtaactcgattgaagaataaactagatgattcagcatacaagatcttgacagatttccaaactgcaacagtgacacttttagcacttatttctgctgcagctggtgatgaagcagactgttcatctgatagaattttgagtaaaaaggagcttttggagggccaagtgccggcgctaaaagctttggttttaggctcctctggctctcaagcttgacagaactcaagaggaccatcacttggttatggtttcattgataactgactcactctgttgatatagacatt

SEQ ID NO: 14713 - DNA, 283 bp, Gossypium hirsutum
  Clone ID: LIB3829-036-Q1-K6-B6
atagccattaacaatgaatctcacctgttgcttccattgaagaaacgaaccttcatcgagtttcacaacatcatgtcgaggaagcgaatttaccacacgttcagcagtgaacacagatccaggaacgtcaacagagtcagacgcagcagagtgtgtcgttgccatgatcagtaacaccaagcgactgataccatgaagaaaactaggtaatctttgagaatttctttccaatcttggagaactttgtttactaaatgaatttagactatttgcttgcgataac

SEQ ID NO: 14714 - DNA, 528 bp, Gossypium hirsutum
  Clone ID: LIB3829-036-Q1-K6-B8
ctctgaaatctccaacaatggcgactgccccttacagcaacaagtacgaagacatcgacaacaattacttcgatacatggaagaaaggcaagcgttcaaagcgacaacgcgacgacgagtcttcttcttctccgccgccgccaccaccgccgacgaatgaagaagagtaccttgctctttgtctcatcatgctagctcgtggtggttccaccactgaaaacgccgtgacagacggtggaaacgatgaccatcgtctgtcttcttcttcttcagcaccggcaccagcggctttgaagttggcttacaagtgcagtgtttgtaacaaggctttcccttcttaccaagctctaggtggacataaagccagccaccgtaaatcctccaccgatgctaaacccgataatcagtccatcaccaccagcagtaccaccgtcagcggggaagccggcggtaacggtaaagcccataagtgttcgatctgccataagtctttccctacaggccaagctttgggaggtcacaaacgct

SEQ ID NO: 14715 - DNA, 524 bp, Gossypium hirsutum
  Clone ID: LIB3829-036-Q1-K6-B9
tttcttctcttctttcaactcaaaaactcccaagtaatattagaatcatgggtgttgtcacttataactatgagtctacctctccagtcgcccctgccaggcttttcaaggctttttctcttgaagctgacaaggtttggcccaaggctgctcctcaggcagtcaagagtgttgaggttgaagctaatcctggccctggaagtatcgtaaagatcaactttgctgaaggccttccattccaatatatgaagcaccagattggaggacatgacgacaagaatttgtcatacagttatagtttgatcgaaggtggacctttgggggacaagcttgagaaaatcagctatgacaacaagtttgaggcagctgcaggtggaggaagcctttgcaagagctcgatgaaattttacactgttggcgactatgtgatcactgaagatgagatcaaggctcaaatcaaagggagtgaaggagtttacaaggctgttgaagcttacctcttggctaaccctgatgcctgcaac

SEQ ID NO: 14716 - DNA, 526 bp, Gossypium hirsutum
  Clone ID: LIB3829-036-Q1-K6-C1
caaaggcgagggtctattttcttcacaaactacaatggcttccgagtctttagtaaccaagaggctagatggtaaggtggcactgataactggtggtgccagtggtttaggagagtgttcagccaggctatttctcaaacatggagccaaggttctgattgctgatattcaagacgaattgggccactccctttgcaaagagcttggaactgaaaacttcagctatgtccattgtgatgtaacatgcgaatctgatgtcgaaaatgccgtaaacttagcggtctccaagtatggaaaactcgatatcatgttcaacaatgcaggccttattggtgatggtgaagtcagagtgacagacgccagcactgacaacttcaagagagtgttcgatatcaatgtcttgggtggattcttgggagccaagtatgcagccaaggtcatggttccggccaagaaaggttgcattctcttctcgtcgagtatttcttcaaaaatcagcatcggtctgccccatgcatacaaggca

SEQ ID NO: 14717 - DNA, 527 bp, Gossypium hirsutum
  Clone ID: LIB3829-036-Q1-K6-C12
cccaaatttcccccataaaacccctaactttgcaaacaaaatgaaaaaaagaagaggaaaatggaggtaccaaatacgattcagcacagaacctctccaatctacttacgagttctaccgtttgtttccctggaaaatatatgagacttaatatttttattttgttactttatttgtgtgtgtatttcatcttgttgtgttcattactcagatccctatcgcttttatttctgttccatttttcctctttattttctaattttgggtattatttactcagatcccctttctttttattattgttttttttctcttatattttagctagaaatcgacgatgccagaagaagttaaaaatcgacgatgcaagttactgctggtctcattgctgctggtaacaagttattgcttaaaattcatggtaacaaatctacttcaaaggaagttattcatattccttcgtatagaagcgaagttatttacggtggaacttagttctccagctcttaagttttttcccagttttg

SEQ ID NO: 14718 - DNA, 505 bp, Gossypium hirsutum
  Clone ID: LIB3829-036-Q1-K6-C2
agagcatgaaggagaaagcagaagcagcgaagcagaagacaatggagaccgcagaagcagcgaagcagaagacaatggagaccgcagaagcagcgaagcagaagacaatggagacaacagaagcagcgaagcagaagaccagaggagccgccgagacaaccaacgacaagacaaaacagacggcgggagctgctagagggaaggcggaggaaactaaggagacggagacaagcggagggatactgcagcaggcgggggagaaagtgaggaacgcggcacaaggtgcgactgatgcggtgaaacatacctttggaatggcggatgccgatgaggatgaacataattatccggctactattactaggaaggattagggtagcatgtagagttaagatattaataacagttgcaatttgtacgtgagtggttttagataacgtacggttgcaaacgcttcgttgttatgagcattgtcttactttgttgtttcagctttttttttaat

SEQ ID NO: 14719 - DNA, 455 bp, Gossypium hirsutum
  Clone ID: LIB3829-036-Q1-K6-C3
cccacgcgtccgaaagaaatgggcagttctgggaagaaatctgctcgtaaactcagtgatatcaatgtcgttgatgaacatgaacttagagaagcttcagctaatattgaaccaaagcatcaaaacgacattgcagatttaataaatagttacaaaagtttatacccaaaatgggtttttgatctcagttaagatttgaaactgaagacaaagcaaggagacttctaagtaatgtgtcatttttgttgaaactagggggttattctttcggtattactcttgaaaaagtgattgccaaaaactgttgtgtatggatttgtgtattttttttcttgtggttactgctgcacctgtttttgggaggtgattgtgtaaacattttagagtgatttagttgttgtaagaatatttttaacattgttaattttaatattactgtaagaatattttgaatt

SEQ ID NO: 14720 - DNA, 527 bp, Gossypium hirsutum
  Clone ID: LIB3829-036-Q1-K6-C4
ggggaaaagaaaaaagaccctagctaagcctcctgtgatccttcttcaacatgggagattacaacgatgccttcatgcgcaaccaaaacgccgccgccgccgttcaggctcgcgttaaaccccctcagaaccgcgccaatattcagcagctcaagctgattggccaaagccatcctactggtttaacagctaaccttttgaagctttttgaaccacgacctccgttggagtttaaaccgcctcctgagaagagaaaatgccctccgtatacaggaatggcacaatttgtgagtcactttgctgagccaggagatcctgagtatgccccgcctgttcaggaagcagaaacacctgcacaacggagagcaagaattcataagttgcgactagagaagggcttggagaaggctgctgaggaactgaaaaactatgatccaaataatgacccaaacgtttcaggtgatccatacaagacattgtttgttgctagacttaattatgagacatccgagagtagaattaaaagg

SEQ ID NO: 14721 - DNA, 530 bp, Gossypium hirsutum
  Clone ID: LIB3829-036-Q1-K6-C5
ctttgattcccatgttgagcaacataacgaagatgagtttcagaaatctttcaaagagatgatttctactctccctaaagggaacagctggggtcttcccgatcatctatatcagtatcaagatttttggttcacctcacctttcctacaaggagtcctgttagctcaacaacagtttgaggctcaacccactgatatcatactttctagtgcccctagaaccggcacagcctggttaaaatctctcactttcgctactattacaagaacttcatacgatgattctaccacccctttgcttttcaggatgcctcatgatgttgtgcctttcatggagcttgatcatgctcatttttccgctaatcgacatcttggaattcctctcttggccactcatgctccttattctttcttacctacatcaataattgattctggttgtaaaattatttacatttgcagggaccccaaggatacatttgtttcaatgtatcacatctgtaccaggtatgcgaaatcccaaaacacta

SEQ ID NO: 14722 - DNA, 525 bp, Gossypium hirsutum
  Clone ID: LIB3829-036-Q1-K6-C7
ctctcgtgggaaacaatacctgcggttccaacttcagttcaaaaatatgtcaagaggaagaagttgcggttgcccaacccgaggcggaccctgctctcagtgagccaatggacatcaacacagccttgccctttggggttaggaagctacgagctcacggagggctcccacggtgattacatgaagctgctaaggccattgaaaagcacaatgcacatatttgcgttatagctgatgactgggaccagcctgattatgttaagctggccaaggcacttatgtgctgatcataatgttaaagcgctacgtgccctgagcgcaaaatcactgggccagtgggctggtttgtgtaatatagactctgagggtaaagcacgaaaggtagatagatgatcctgcatagctgtacaaagattattgtgaacaacatgaggccgtcgaatttgttcatcagaacaaggactatgcgaccggaggatggtttatttggtaaaatacatagctatacatctgggccatatatat

SEQ ID NO: 14723 - DNA, 527 bp, Gossypium hirsutum
  Clone ID: LIB3829-036-Q1-K6-C8
tccaaccccaaccccaatcctgtttctcttttgcatcctttgtttctctcttcatctcctgcactacttgcaaaataacgagctgaagccgtgctacaataacactagtgttttcaacaataaattaatcatagccgcagcttgtttcttttaaactctaaatataaaggaggccaaacatgccgcctcgtagataccaatttgggagggctgatgaggccactcatcccgactccatgagagccaccttggctgaattcctctccactatcattttcgtctttgccggcgaaggctcaattcttgctcttgacaagatgtacaaggatacgagtgcgacgcctgcaagactggtgatgatagcacttgcgcatgggttgtctctgtttgcagctgtggcatccagtgtaaacgtatctggtggccatgtgaatccagcagtcaccttcggtgccttgctctgtggaaggatctctctcgttcgggcgctgtactactggattgctcagctcttaggttccattgtg

SEQ ID NO: 14724 - DNA, 524 bp, Gossypium hirsutum
  Clone ID: LIB3829-036-Q1-K6-C9
agcacctattggtcttatattgaattttcaattgtagacttccctattaaattgattggtcttagattaggttatctgaatttttttttttcagattgttaatcgatggttttagaagtagattattgacttttgctcacccagtttttcaatttccccttaacttgttcctttctgcagattcatgaataatcattcttttctcttacatctagatgctttcaaggcttttaaaagttttgggtttttgaaggttttgttaatttatatattgttttgtgaatttgtcatcggaattcttgtgtataaacagacattgttaggtggttaaattgatgcactagaagctaaaactcatttccctgctaccaatttttgatcttttttaattacatcttaattggtattgagagttgcatgtgttcttgcaaactttttggggatgaattggataattgttaaccatgaaagttttgaaatttgaaagtgggaggaggtcccagtttcctgtttcatcaagcttg

SEQ ID NO: 14725 - DNA, 526 bp, Gossypium hirsutum
  Clone ID: LIB3829-036-Q1-K6-D11
tccatctcgatcttcgacatttggttcaggtttccgtgactcgggaccagagcctgatagatggtcccgaggtgggggtggaggtggaatcagagaggaaaggcctagattagttttggatccactgcgaggggatgtgaatgagcttgtggttaagacaaataagtcgaatccttttggggcagcgaggcccagggaagaggtgctagcggagaaaggattggattggaagaagctggactctgaaattgaggcaaagaaggaaactagtaggcctaccagcgcccactccagcaggccatcgagtgcacaatctagcaggtccgaaggtcccctgcagcaagcgattgaaaatgtggtcaagccgaggcctaaggtcaatccgtttggtgatgctaagcctagagaagttttgctggaagggcgaggtcaggactggcggaagattgatcttgaattagaccgtcgcaggatagacaggccagaaacagaagaggaaaagatattgaaagaagaaatagataat

SEQ ID NO: 14726 - DNA, 526 bp, Gossypium hirsutum
  Clone ID: LIB3829-036-Q1-K6-D3
gaagaagtcattttctgacccagaggatataagtggatctttaagtaatcagtatgattcatctggggaagattcttcagcttcaaatggtgattcttcaagactggcattagatcgatatgatgaccagcttctgctcacaagattcatttcaagtaggactataaggagagagttgaggcggcaacagcgtatagctgctgaaagaatgtgtgatatctgtcggcaaaaaatgcttcctgataaagatgtagcgaccctcatgaacttgaataccggaaaacttgtttgcagtagtagaaatgttaatggggctttccacgtatttcatacttcatgccttatacattggattctcctttgtgagcttgagaggattgagaaccattcagttaatcctaaatcaagacgaagatctaggaggaaaaatcgaaccaaatgcaagaagatggggaaggaaggagagactaaacctacagggaccctgattaattctgtactctgcccagagtgccaaggtaccggt

SEQ ID NO: 14727 - DNA, 526 bp, Gossypium hirsutum
  Clone ID: LIB3829-036-Q1-K6-D5
caaatataccctaaaaaccctttcactaaaaattgaagatgcagtcaatgaaggatgctgctgcctctgctaaggccggcatggagaaggccaaggcctccatgcaggaaaaggtggaccaaatgaagacaagggaccctaatgagaaagagatggcgagggaaaggaaagaagagagacaagaagatgcagagctgaggaaacaagaggcccgccatcataacgccacggctggccatgctggtggtggtggtattggtggtactggctacaccacagctgggtacaacagaggggatactggtggctatggcggtaccggtggacatgacaaccgtgggtaccccaccgcaggtagtgggtatgatacaggcaggcaagatgacctcagcagtatggggtttggcggagatacagggggtgcttacggtacaacgggaaaccaagacttcccaagtgcggcgcctaacaatgctgggactagaaggagcacccgcggaggtacccaggatgatccttattatcg

SEQ ID NO: 14728 - DNA, 490 bp, Gossypium hirsutum
  Clone ID: LIB3829-036-Q1-K6-D7
ctccaagccttggttcaacaccacctgcctcatcttcggttctgctcttgttacctccacgacagctatggtgggagacatgctgggatccgacaagccatcagcaggtaaattggcatcgatgtactccccttttataggatttgggttcctagccatactgcgagggctgctttcggaatcccccaacgcttccaaaaccattgccaacggaccaacgtcggctttgaaaaagaaggcctgaagttgacacgacttataaaacatcatcttcttccttgatatgcgatatccatgttacaacaataaggatcaaaattcaaagtagaaaaaattacaaatactactagcaatctaatagtatttgtagttgtttctttgtcatgtttagaaagttttattttaaaaggtgtgattatgagtaataattttaatgcattgcctttttttttccttctaacttataattataaaccatttctttctatag

SEQ ID NO: 14729 - DNA, 528 bp, Gossypium hirsutum
  Clone ID: LIB3829-036-Q1-K6-E1
gtttgttttcgtctaaagcggttaatatgggaatgtctatgaacgtggttgtgctgtcattgttcgtcttgtctattttgttttctgtcatgactgcatccgacgatgggttggttagaattgggctgaaaaagaagaaatttgatccaaacaaccgacttgcttcccggcttgagtccgaggatcaacaggctctcatagcatctatgcaagaaaagtatggcctccataataatcacggagaccatgaggacacagatattgttgccttgaagaactacatggatgctcagtactacggtgagattggtgtaggaactccaccacaaaagttcactgtgatatttgacactggcagctcaaatttgtgggtgccatcatctaagtgttatttttcggttgcatgctacttccattccaagtacaaggcaagtgagtcaaaaacatataagaagaatgggaaacctgcatctattcagtatggcactggagctatttctggtttctttagttatgacaatgtccaag

SEQ ID NO: 14730 - DNA, 529 bp, Gossypium hirsutum
  Clone ID: LIB3829-036-Q1-K6-E10
cccacgcgtccgcccacgcgtccgggatgacgttcgaaactgtctggaagaaacgggtgccgacggtgtgctttcggccgagactcttcttgagaaccctgctctttttgctggattccgaacttccaattgggttgtagataacgagaaagactctattgatggaaaactagatcaagccgatctcgtcgttcagtacttgaagctttgtgaaaaataccctgtcccatggaggatgatccggtctcacgttcacaaaatgctaggagactggtttagggttcaaccgcaggttagagaggaactaaacgcgcagtccaggctaacgttagaatttctttacggtctggtggatcagttacgagaattgggtgtacgagttctacttcatcaaaaggatgatgcttcggcaaccggaaacttggccgaggtaatcggtattgattacccggaccaatgtgaattgagtcgtaggtgcttagaataggggaaaatcagacgccaatgaatttttgagctaaaaagaaag

SEQ ID NO: 14731 - DNA, 343 bp, Gossypium hirsutum
  Clone ID: LIB3829-036-Q1-K6-E11
gcagcgtaagtttattgagactattgaactccagattgggttgaaaaactatgatccccaaaaagacaagcgtttcagtggttccgtgaagttgccacacattcctcgacctaaaatgaagatctgcatgcttggagatgcccagcatgttgaagaggcagagaagataggtttagattatatggatgttgaagcactgaagaagctaaacaagaacaagaagttggtcaaaaagcttgccaagaagtatcatgcttttttggcttctgaatctgttatcaagcagatccctcgtcttctgggtcctggtctcaacaaaagcggggaaaattccaaccccttg

SEQ ID NO: 14732 - DNA, 518 bp, Gossypium hirsutum
  Clone ID: LIB3829-036-Q1-K6-E12
aaccgatgaggcactagggttggttgtagatagttgctcgtcactgaagctgctaaaactcttcggatgtacacagatcaccgacgtgtttctaaaagggcattcgaatccccaggtccagatcattggactgaagatggcaacattattggaatttctcaacgtgtttgaaccccgagaagctccattgcggtattcaccggtcgataatctccactaattagttccagcttgaataacctcagtttgctagcttcagcttcattcattgacatatatacaaaagcaatactgattcattcaaagccttatcagaacataccctacaaaaataattaccatacaccagaccaagctaatctctgtagagatacatacttctcacttctttttggtgtcctattacattcacaatcatccaaaacctgtataatgctcaatgaaatgttttggatagttcacatgatatgaatcaaattgaagagagagaaattttctccattgttgagactattttc

SEQ ID NO: 14733 - DNA, 529 bp, Gossypium hirsutum
  unsure (1)..(529): unsure at all n locations; Clone ID: LIB3829-036-Q1-K6-E2
agcantataccctgaaaaccctttcactaaatattgaagatgcagtcaatgaaggatgctgctgcctctgctaaggccggcatggagaaggccaaggcctccatgcaggaaaaggtggaccaaatgaagacaagagaccctaatgagaaagagatggcgagggaaaggaaagaagagagacaagaagatgcagagctgaggaaacaagaggcccgccatcataacgccacagctggccatgctggtggtggtggtattggtggcactggctacaccacagctgggtacaacataggcgacactggtggctatggcggtaccggtggacatgacaaccgtgggtaccccaccgcaggtagtgggtatgatacaggcaggcaagatgacctcagcagtatggggtttggcggagatacagagggtgcttacggtacaacggggaaccaagacttcccaaatgcggcgtctaacaatgctgggactagaaggaacacccgcggaggtacccaggatgatccttattatcgat

SEQ ID NO: 14734 - DNA, 529 bp, Gossypium hirsutum
  Clone ID: LIB3829-036-Q1-K6-E7
cggacgcgtgggttggaagttaatccgcatgaatcagctgttgaatgatggtcatatactggttgagggaattaaattaacaatggaggagcagtcagtccaattagaagccaaacatacgacaaaattagcaggggaattattattcccttcttgccaagcggtggccgactccaatctaattaaagaagccaaatcagctttgaagagttaaattaaaactctactaagctgaagctattttcatgcaacgagtttagctaggaaacgggggataaagattgaatttaatttttgaattgtggaaggatattattccataaatagagaagattagcaactggaagggagtggagaaaaacaaagaaaaaaatacagcaacgtagcggcaagcagaatttttttaaaaaaattggaccagcaacccgatcaaggagctggagtagcagctagtaaattcggctagttgggagaagggaaaatcggtcgacttgaagaacttcatcttccaagagccagtttgtaattc

SEQ ID NO: 14735 - DNA, 350 bp, Gossypium hirsutum
  unsure (1)..(350): unsure at all n locations; Clone ID: LIB3829-036-Q1-K6-E8
cccacgctgttcggcgaatctagtgaaaaaaaatcatacgcactgagcactgctggtcaggttattcgttgcaaagctgcggtggcatgggaggcggggaagccactatcgatagaagaagtggaagtggcaccaccccaaaagcatgaagtccgtattaagattctcttcactgctttatgggggagtgatgtatactactgggagtgtaagggttacactcctctgtttcctcctgtacttggtcatgaagcctcagggatcgnggacagtgtgggtgagggtgtgaatgattgcgaccctggagatcatgtgctccctatcttcaccggggaatgctcaggatggct

SEQ ID NO: 14736 - DNA, 485 bp, Gossypium hirsutum
  unsure (1)..(485): unsure at all n locations; Clone ID: LIB3829-036-Q1-K6-E9
ttcccggtttttctctttcgtccggtagttatatcgncatgcatcatccagaggatgtgccttctaagctttgntgaatcttccatgaatgctgagaattatggggttggagtgaacaaaagttctgccattgctaaataagcaagtaatcataattgtggtttgttacgggaaatggttcaattaggtgtgtcttcatttcattggggggctgtaatgtatcatttgaaagttgtcacttggagccattagcacttataaactggtaggcgtttgactttttctagtccggcaccgccgcaccaatataaagttctcttttgcttcctctaccaataatccggtaggatggaacatatttaatatgctgggcctggggctggtaatgtgtcctaccacagatgattccggcggccgagacatgcttctaaagacaaaatgagcccaccggcttcgggggaccaggtatacatcccggtcgcccc

SEQ ID NO: 14737 - DNA, 529 bp, Gossypium hirsutum
  Clone ID: LIB3829-036-Q1-K6-F1
atttgctattacttgttgcatgcattttgtgggggaaaacaaataatatgcaggccatgttatcaatctattgtttttgtataatcacatatgttctcatgttctcatccttttttacaatctgagaatatttcttttcgttctggttggtattcaggcaaagccattttaatagtaatgactctaggatttgaactcagtccaaatgcttgaggaagaagtcaaggggggacaaataacaagcatgccatgttatccaactattgtttaccacaacttttctaatccgttttacagcttgagaacaattttgttcgggttgagtggtatttaggtaaagcccttctaattgtaatgactttaggatttgaacttagtccaaatgcttagggaaaattcaactaccacttacttccaaccacgaattgttacgaatcgtttatccatctatagttttcaacattccttatagttcctgcattttagttaccttaattctaactagacactgacggtgcctatttcggga

SEQ ID NO: 14738 - DNA, 525 bp, Gossypium hirsutum
  Clone ID: LIB3829-036-Q1-K6-F11
gcacgttgttttgtgttctgtgtttctcaataaattccttattcctacaaaaccattccttttttataaccccccaaaattaaagaaagatcaaaccgaccctttgcaattccaagacacaagaaccaagacacataccacgatggcaacaacgacggagaagcaagccatggttgttggaatcgacgacagcgagcacagtacgtacgcgctgcagtggatcctcgatcacttctttgctcctttcgcttccaatcctcctttcaagctcgtcatcgttcatgccaagccttctgcttcttctgctgttggtctcgccggacctggagctgctgatgtattgccctatgtggatgcggatttgaggaagatcgctgccagggttgttgagaaagccaaggaactctgccttagcaaatcggtacatgatgccgtagttgaagtgggggaaggtgatgcaaggaatgttctctgtgacgctgtagaaaaacaccatgcctccattctcgctgttggtagccatgg

SEQ ID NO: 14739 - DNA, 526 bp, Gossypium hirsutum
  Clone ID: LIB3829-036-Q1-K6-F12
ctgaaaaccctttcactaaatattgaagatgcagtcaatgaaggatgctgctgcctctgctaaggccggcatggagaaggccaaggcctccatgcaggaaaaggtggaccaaatgaagacaagagaccctaatgagaaagagatggcgagggaaaggaaagaagagagacaagaagatgcagagctgaggaaacaagaggcccgccatcataacgccacagctggccatgctggtggtggtggtattggtggcactggctacaccacagctgggtacaacataggcgacactggtggctatggcggtaccggtggacatgacaaccgtgggtaccccaccgcaggtagtgggtatgatacaggcaggcaagatgacctcagcagtatggggtttggcggagatacagagggtgcttacggtacaacggggaaccaagacttcccaaatgcggcgtctaacaatgctgggactagaaggaacacccgcggaggtacccaggatgatccttattatcgatcctattaa

SEQ ID NO: 14740 - DNA, 521 bp, Gossypium hirsutum
  Clone ID: LIB3829-036-Q1-K6-F2
gccgccgtcgccaccaccaccaccaccatcaacaacaagtttggtcacactccctcttcttccatgtttaaaggtggcaatgtgaagtggcgtgccttgaggcttgacacaggaaactactcctggggaagtgaggctgtgacttgtaagaccagaattttggatgtggtgtacaatgcgtctaacaatgagttggttcgtacacaaactctggtgaagagtgctattgttcaagtcgatgctgctccattcaagcaatggtatctccagcactatggtgttgacattggtcgcaagaagaaagcagcagcaggagccaagaaagaaggagaggaaggtgaaactgctactgaggaagtgaagaagagcagccatgtcttgaggaagctggagaaacgtcagcagagtcgcacacttgacccccatatcgaggagcaatttggtagtggtcgtttactggcttgcatctcttcacggcctggtcaatgcggccgtgctgatggatatatcttggagggcaa

SEQ ID NO: 14741 - DNA, 496 bp, Gossypium hirsutum
  Clone ID: LIB3829-036-Q1-K6-F3
gccagatttataaaataaataaaaaataaaaatcatattttccttctgtcatttggctatgtattttattggttgtttctcgtgtattctgttgcaagcatggttatatggaggagaagacccttgtgacgtgaaagccaagcgtgaaaatttgctcgtgggagcccgaccctctggcgctgctctagcgcattcccgaaacttcctttgaaatcggatggctaggggccaagtccattgttgcggcgctaatcagcagactagggtttccccttctgaaatcagcctttgggtcatttgggccattgggccatttttgcatttgggcctttgggttcattgggttaggattattaggccattcgggctaggtttattgggttaggaattaatttggtatttaattttaatatttgggtttggtttggttttggcccaaaaattttgtaaatggacactatacttttaaatttgtatcctttatttgttttttttt

SEQ ID NO: 14742 - DNA, 523 bp, Gossypium hirsutum
  Clone ID: LIB3829-036-Q1-K6-F5
tttctttttgttttacaggtatgggtgctgcgtacgggacggcgaagagcggtgtcggggtggcatcgatgggagtgatgaggccggagctggtgatgaaatcgatcgtgcccgttgttatggctggagttttaggtatttatgggttgattattgcggttattatcagcactgggattaacccaaaggccaaatcttactacctgttcgatggctatgctcatctttcctctggtctcgcttgtggcctcgccggtctctctgccggtatggccattggaatcgtcggcgatgctggagttagagccaatgcccaacaaccaaagctttttgttggaatgattcttattctcatttttgctgaggctttggctctctatggactcattgtcggtatcattctctcttcccgggctggtcaatcccgagcagaatagagtgcaaagttccgaaacttgggtcattgctagtaggcttcacttggttgtttctccaattcttgccgctagtgcagtatgaaaca

SEQ ID NO: 14743 - DNA, 530 bp, Gossypium hirsutum
  Clone ID: LIB3829-036-Q1-K6-F7
tgaaaacttcctagtctggttcctttctcatctcatatcggccttgctcctcagcgtattccggaacacccatatccagaaactgccatcccttcccggttcctatttggactgctttccggcaggctattgcttctgcagcaaatgccgataagatattttcatggatttctgtacatgataagaggattttcccttctgaatctcttaccacaactccggaggccgagcggttctggcttttattgaaggccccgtcaaaattgatcttaatgaaccctccctgtggccttttccatcttatttttcccccgagtgcacaacagaagagtctactgtgataaaggttaagcttttccagcacccaggacagtcacaaaaaagatgattcattgtttcagctcattcaccgcaacggggacaactttggttaactgttaactttcaatgctgaaggttcacctttgtaggaaaatagttccacgataacctccatattgtgacctttatttttgttggtagacttaggc

SEQ ID NO: 14744 - DNA, 525 bp, Gossypium hirsutum
  Clone ID: LIB3829-036-Q1-K6-F8
ggttaaatcactcaaacttgtgcagaagaatctcataaataagatttatactgattctgctgaagccaagatccctgcagttctagattatctaggaactattgttgaggcagactgcaaatttttaatatttgcacaccatcagcccatgattgaagcaatacatcagtttcttcttaaaaagaaagtaggttgtattcgaattgatggtactacccccgcatcctcaaggcaagctttggttaatgattttcaagagaaagatgctatcaaggcagcagtgctttctatcaaagctggaggtgtcggattaactttaacagctgcaagtacggttatctttgcagagttgtcatggactccaggtgacctgattcaagcagaagatcgtgctcataggattggacaggtctcttctgtgaatatatactatctgctggcaaatgacacggttgatgacatcatatgggatgttgttcagaacaagttggaaaatctgggtcagatgctagatggccatgagaa

SEQ ID NO: 14745 - DNA, 401 bp, Gossypium hirsutum
  Clone ID: LIB3829-036-Q1-K6-F9
ggtttgaacaacccaaagatcataccttgtctaaaaccaaaaaaccgaaccaaaacgctgaaaatggaatcatctggacgttcaaggaggcgcttgtttcattgaagaagataatgggttggctgctcttgcattatggagtctgggtatgcaggaattcattgccaaactcataagcaaaatggatttttttgaagacctctttggaactcaaggagaagtagtgtgaggaatatgtcatcatcatgatcttcatctatcgattgcgcttcggctacttgttcaaggtctgggaagtttttgtgatgccagatccgaagaccatcagtcccatttgtgggatgcttgtaggcttggcaagaagcctatggagggtgacagagacatctgcatgtacagag

SEQ ID NO: 14746 - DNA, 521 bp, Gossypium hirsutum
  Clone ID: LIB3829-036-Q1-K6-G1
gttgacaagaattatcatttaaagatgaagacctctagatttattttcagtgaaataaatcagaaatttcccattctcccattcactgccagggctctggaagagaaacgagctcgtctaggtttagtcgaatgcgtgaatcatgatctgttgcagccatatcccgttcttcatgagaagcctggtgattatgttgctcatataaaattcacggtgttgctaatgcctaatggatcagaccggatcacactgcatccgatgcagaagctgcagccaaccaagacaatagatgatcctgaaatcaagggatggttagctttgggaacgaagacgaagaaaaaaggtggtgggaagaagaagaaaggtaagaagaatgagggtgataaagctgatgcagagcctatggatgcatcaaaaactgatgccgctgcatcttaagaaacaaactcctattcttctactcgaccttttttctttttaaatttcaattttggtactttgttcactttgtatctgtttgt

SEQ ID NO: 14747 - DNA, 521 bp, Gossypium hirsutum
  Clone ID: LIB3829-036-Q1-K6-G10
aatatgttccgctgccatatctgatatctccctcaaattcaaatccccatcaattccagaagaccaagctttgacaaaagcctttgcagttataagtctagggttttcctgttttcttttattcttttttttcttttttaaatggccttttctccctcgttcagacctaacatgcccctcgttctatctcctttccttgaccgaaccggaccccctaatcctcttttaaatcgacctcaatttcctggtttttctgctcgcgggcagttccttcgtggttccctatccgtggccaagtttgggttcaaacccggactcttgcccgacccggaggcttccgaaggtgttctcagagagctgttcactagagctgaaagccttctttatacgattgctgatgcttctgtttcgtcttccgacaccattgctacaaccactagtgctactagtaaacaaaataatgattggctttctggaattgccaattccatggaaactgttttgaaggtcttgaaagatgg

SEQ ID NO: 14748 - DNA, 326 bp, Gossypium hirsutum
  Clone ID: LIB3829-036-Q1-K6-G3
agctgtgggtctgggcgtgctgggcgtcagaggataattgttctctggaagctgatgacctaggatacaccggcatcaggcttgtttctcatcttgcccatattccttcttcggctggtcatctcaaggatgtgttgctattgatgtctgagacgcatcgactgcaacgtcagggggttattcgtgcttcagtgactctggaccatagtgttggagaaacgaattctgtggccccgctattcgagattaatctaccagttccactggaaatgagaagagaggactttgccttaccatcagctactcccgtgaagctcgaacagcta

SEQ ID NO: 14749 - DNA, 525 bp, Gossypium hirsutum
  Clone ID: LIB3829-036-Q1-K6-G6
tgataatgagttagcgagttgtaattgtgatgatgagggcctttggagtgtacatagcattttagagtgccagaaggtgagtgatttcttcattgctgtggcttatttttcgatacctattgaactgctttacttcattagttgttcgaacgtccccttcaaatgggtccttgttcagttcatagcctttatagtgctttgtggattgactcatcttctcaatggatggacttattatggtccccactcattccaattgatgctgtccctcaccattgccaaattgctcaccgcccttgtctcatgtgccactgctataacactattaactctgatccctctcttgctcaaagtaaaagtgagggagattttcttgaggcaaaatgtattggagttagatcaagaggtggacatgatgaaaaggaagaaggaagccggttctcatgttcgtatgttaacacaggaaatcaggaaatccttggataagcataccatattgtacaccactttggttgagctttctaa

SEQ ID NO: 14750 - DNA, 441 bp, Gossypium hirsutum
  unsure (1)..(441): unsure at all n locations; Clone ID: LIB3829-036-Q1-K6-G8
agctgtgccgtgggtggagatacgttgcactcgatggtgaccgatcgaatatcgcttcaagaaggttcttcagtgcttgatcttcaggccaacgactacttttcttgctccgttgcaaggaaaagatcaaactcgcgctaccgccttcaatcatctgatgaaggggggacactcttgagagaactagcagatcatcgttgatggtaaaatcccgagatttaaagcatattcttcgatcgtatcatatttattgttattgcagacatagtagttcttatcggtcatctacagtatatcatgggatatatacctagatggattttacattagacgtagcaaagttcaaagattagttttatatatttagtagtaaaagttctttttgaaaataataaatttccttttttttccnancatatcccaataaaaaaaccatttttc

SEQ ID NO: 14751 - DNA, 526 bp, Gossypium hirsutum
  Clone ID: LIB3829-036-Q1-K6-G9
ctgacgcgtggtgcggccgcattggtgaaaagaagagaccgatcactttttgctagctaagctactgaggaaggtattgaacctcagaacagcgttggccgcaactaataatatcataatatatgagataaagcttatacatccagaactaccctccaactacatatgtaaactagataaacaatatataggctcgctctgggactttctttaagccacatggtgctgatatgtttgacggtctttatggcttcgatgataaaggagaggctactcgactgcaccgtcagcggtagagacagatagatctggtaggcctggggcgatgaggtaaagtggaacgaagacatgccaacaaagattctatgtcgcttgagacaatggcttattcttcaaattgagcgcctgaccctgctacagggacttaccggacggagaattggggggctgatatcaacgcagatgacctccggtagatggtggtgaatcacaagattagattacagccaaaacttgccaccgcatg

SEQ ID NO: 14752 - DNA, 538 bp, Gossypium hirsutum
  unsure (1)..(538): unsure at all n locations; Clone ID: LIB3829-036-Q1-K6-H1
gtttaggatagtaggctagggttaggttaggtttgggcttagttttgggtttttggggcagttgggttagtttgtatctgggccaaatttgggcctcaacacatcgcataagtgctttcccttccttatttgctaacatccattccattccaacattgtagtataaaacagacaatctaataaagagaaatggttcaaaatcaaaaaaaaaaaaaaaaaaaaaaaaaaaaaaaaaaaaaaaaaaaaaaaaaaaaaaaaaaaaaaaaaaaaaaaaaaaaaaaaaaaaaaaaaaaaaaaaaaaaaaaaaaaaaaaaaaaaaaaaaaaaaaaaaaaaaaaaaaaaaaaaaaaaaaaaaaaaaaaaaaaaaaaangggggggcccttttaaaaaaaaaaaatttttccccccgggggaagaaaattttttttttttttttggggccccaaaaaaaaaatccgggggcgcgttttaaaaaccggggggggggaaaaaacccgggggcccccaaaaaaaaacggggggagaaaaacccttttta

SEQ ID NO: 14753 - DNA, 453 bp, Gossypium hirsutum
  Clone ID: LIB3829-036-Q1-K6-H11
gtcgttatagttttgcgatagcgaaacctaatttcatggcagtggccgtacatcgacaacgctgggactgggataaccctgccgatcccaatcttattggacttgatgcacattccgcttgctgcagttggagtaataaggaacaggccggtaccgctcgcccttaccaacacatgctcaatctgaatggggactggcactcgccctgtacctgaacatcaagcgctgtgggtgttgcgctcacgcgcaccgttaccgttgcaattgccatagccctagctccttttgctttctttcttttctttttctttatggccacgttctttggctgtcccggtctagctctaaatctgcgtctacgtttacggttcagatctagagctttactgcacctcaaccaactaaaactggattatggtgaacgttcaggtacagggccatgatcctgataga

SEQ ID NO: 14754 - DNA, 523 bp, Gossypium hirsutum
  Clone ID: LIB3829-036-Q1-K6-H12
gttttgaagcagagaagagcaaaaaaagctttttcaagctcttttccttttcccttctaaagggggagaaagttggaaacaaagagcctaagcttataatttgatggataccggagggaattcattaccctcgggacccgacggtgtgaagaggaaagtgtcgtatttttacgatccggaggtcggcaattactattacggccaaggtcatcctatgaaacctcatagaatccgaatgacgcatgcccttttagcacactatggattgcttcaaaatatgcaagtttacaagccattacctgctcgagaaagagacctttgccgtttccatgccgatgattatgtgaattttcttcgcagtataacgccggaaacacagcaagatcaactccggcagcttaagcggtttaatgtcggtgaggattgtccggtttttgatggccttttctcgttttgtcaaacgtatgcaggtggatctgttggtggtgctgttaaattaaaccataatatttgtgatattgcg

SEQ ID NO: 14755 - DNA, 526 bp, Gossypium hirsutum
  Clone ID: LIB3829-036-Q1-K6-H2
gctcaagttggatttcaaatcccctagggatcggttggattgcttgaaaccctgtagcttgcagtagtctattttgttagccataataagtagttttgaggcataatacatgcctttattcaatagcgctactgagtgtacttttatttggcagtgctttctttctttttgtcttgctgctccagtaccttatgtttgatagtgtttaagtaagccttaataaattatatatcttaaatttatgttaacttgctattttcaatattttgttggttatctcactctaagaaaattttacactatgattatgctggatttgatacgatcattacggtatggagatttaccaaggatttttattcatagcattggagctatgggccacttgggttgatcactcctagagatagctataaacgtagtggtagttgacactagacgatggcacaatcatttttcccctgaatttgcccttctgttttacaggcggcaagatgctcaagagatcaaaggtggagtcaagtct

SEQ ID NO: 14756 - DNA, 523 bp, Gossypium hirsutum
  Clone ID: LIB3829-036-Q1-K6-H3
gtttgctcggtgaatactgtcccacttctagaaaaaaggaaggtatctgcatgcatattgaggtcagtaatacagaaaaatttggttgccattttatgcgacctattccaagttcaagaaagcagtctggtaaaggatttcttaccacaattggaaacactagtatctgatccctcctttgtgattacgtctattccacaagttcgatcaagatggctttgcagaatattggtgcttccaacagtgatgatgccttttataggtataagatgcccaaaatgataaccaagattgaaggacgaggaaatggcatcaagactaatgtggttaacatggttgagattgctaaggctttggctagacctgcttcttaccctgtaaagtattttggttgtgaactgggagcccaatccaagtttgatgagaagactggaacttcactggtaaatggtgcccatgaaactgccaagcttgcagggcttcttgagaacttcatcaagaagtatgttcagtgctatggttg

SEQ ID NO: 14757 - DNA, 529 bp, Gossypium hirsutum
  Clone ID: LIB3829-036-Q1-K6-H4
ctcaatacggatccctctcaaaggttcaccgcactgcaggttttagatcatttatggatgaagtacgatgaatcttgccatgaagaatcaagtgagtttgtataccaaagtcatggagagttggagtttcatagtggctcattttcgttgtcccgggatcaggatatcagctttggtgctggatcgccaatcatttatgacgttcaatcaccctcgttaacatgcagaacctcattttcttcttccttggtggagccatctacaacttgctttgctttgggtggattttctttccacggtggtaattctgaaaccttagaattttcttctgctgttccatcaatgccaagctttgcattcttcagtcctagctccgttgcagaacaagagaacattgccctggttgagcgatttgctggagatacagggttggataaactgctcgtgctaccggattcttcactttcctgtggacctgaggcaagagaaaaggagaccaagacagctgaattcggaaggacaggaggaa

SEQ ID NO: 14758 - DNA, 500 bp, Gossypium hirsutum
  Clone ID: LIB3829-036-Q1-K6-H5
tggtacgttcacctttattagtattaggaggtattgctgggaagaatagtaaggcggattttcaagccccttgtcgcaccacaaaatatcctagagagatcccaccattgccttggtaccggaaaactattcctcagatggcaatggcaggtttcttgccattcagtgctatctatattgaactttactacatatttgccagcgtgtggggacataggatctacaccatatacagcatcctgtttattgtctttatcattctcttgattgtcactgcttttatcactgtggctttgacttattttcaacttgctgctgaagaccatgagtggtggtggaggtccttcctttgtggtgggtctaccgggctgttcatatacgcctactgtttgtattattacaatgcacggtcagacatgtcaggcttcatgcaaacttcgttcttctttgggtacatggcctgcatttgctatggctttttcctcatgcttggggctatt

SEQ ID NO: 14759 - DNA, 524 bp, Gossypium hirsutum
  Clone ID: LIB3829-036-Q1-K6-H6
gccgcagctgagatccgacactccacagcgcagcaatgggtgaggaagtaaaggctttggttcctgagtcactgttgaagaagaacaagaggaatgaagaatgggagcttgccaaaaagcaggagctcgaagccgcgaagaataagaaagtcgagaaccggaagttgattttcaacagggctaagcaatatgcaaaggagtacgaggctcaggaaaaagagttgattcaattgaagcgggaggcgaagttgaaaggaggattctatgttgatccagaagctaagcttttgttcattgttagaatccgcggtatcaatgccatgcacccaaggaccagaaagatcttgcagctcctacgtttgagacagattttcaatggtgtttttcttaaagtgaacaaggcaacaatgaacatgcttcaccttgttgaaccttatgtgacttatggatacccgaatctcaagagtgttagggaactcatttacaaaagaggttttggaaagttgaacaagcggcgagttgcc

SEQ ID NO: 14760 - DNA, 533 bp, Gossypium hirsutum
  Clone ID: LIB3829-036-Q1-K6-H7
agtcaccattgttcctagtgatgctcctgatgattatatggccttacaagatttaaaagcaaaacctgcttttcgggcaaagtttggggtgaaagatgagtgggtgttgccttttgagattgtacccatcattgacattcctgagtatggagacagggcagctgaaaaggtttgtctggatcttaaaattaaaagtcagaatgagaaagacaaacttgctgaggcaaagagattggtgtacttgagaggttttacagagggaactatgattgttggagaatatgctggaagaagagtccaggaagctaagccgctgttgaggaccaaactgattgagacgggccaggcaataatttatagtgagcctgagaagaaggtcatgtcaaggtctggtgatgagtgtgttgtggctcttacagatcaatggtacatcacatacggggaaccagaatggaaaaaattgtctgaggagtgcttatccaacatgaatctatactctgatgagacacgtcatggctttgaacatacgttag

SEQ ID NO: 14761 - DNA, 526 bp, Gossypium hirsutum
  Clone ID: LIB3829-036-Q1-K6-H8
ggaaggactctagaagacaagcaattaaagaagaggaggccagatccgaggctgaaaagagaaaaaatgcataccaagcagcatttgccaaagcagatgaggcatcaaaatcactgcggctcgaacaaacgcttacagttaaacctgaggaagatgaaaatcaggtttttgctgatgatgaggaggatctttataaatcccttgaaaaagcaaggaggttggctcttaaaaagcaagaagaaaaatcaggtccacaagctatagcgctccttgctaccacatctgctagcaatcaaactacagatgatcatacctcaactggagaggcacaagaaaacaaggttgtgatcactgagatggaggagtttgtatggggtcttcagcttgatgaagaagcccataagcctgacagtgaagatgtcttcatggacgaggatgaagtgccaggagcttctgaacaagatagaaaaaatggagaaaacgaggtgggtggatggacagaggtcattgatactagtgctgatga

SEQ ID NO: 14762 - DNA, 522 bp, Gossypium hirsutum
  Clone ID: LIB3829-036-Q1-K6-H9
ctttgttttgctttgaaacacccaagaatcataccttctctaactaccaaaaaaccgaaccaaaacgctaaaaatggaatcatctggacgttcaaggaggccttgtttcattgaagaagataatgggttggcttctcttgcagttatggagtctgggtgtgcaggaattcattgccaaactcataagcaaaatggatttttttcaagacctctttgttactcaaggagaagtagtttgaggaatctgccatcatcatcatcttcatctttttattgttcttcgggttcttctccaaggtctggtaggttttgtgatgccagatttgctgaccatcagccccatttcttggatgcttgtttcctttgcaagaagcctattgggggtaacagagacatcttgatggacagaggggacacacctttttctagtgaagagtgtacacaagaacaaatagagattgatgaagctaaggaaaagaaccataacctttcatgctgcattaaagctatgagaaagaaaga

SEQ ID NO: 14763 - DNA, 545 bp, Gossypium hirsutum
  Clone ID: LIB3829-036-Q1-N6-A1
cctactacactgtgcccttgggggccagtggcccctactgcgggtcggcaatcgggcgacgggcgcgtgcgtcgctactagcccggattctgacttacaggcgttcacacatgctccaccccacggaacctttgagccgctggctaatcaaccaagcaagacgaccaaaagaccgaatcaacaaacccttttttactagggggaattactcctgagacgcggtcattagaccgggaaaattaatctatctcaggactgaataaacccaactcacttttcaaaaaagccggagaacaaaccaacactttttgaaaaatgctaaaaagtggttgcaagagcccccttcttacgaccaaaaaggctctccaaaattaacgcccggatgccacaagaaacataaccctggggaagctcttgtgacaccgaaatccatgtattgggaccgaataaacgatttattggccacatttttacggacaagagtttttcttggaaacttaattaaacgagcttttaccctatggaaccacacgagtattgtgaac

SEQ ID NO: 14764 - DNA, 526 bp, Gossypium hirsutum
  Clone ID: LIB3829-036-Q1-N6-A4
tttttttttttttttttttttttttttttttttttttttttttttttttttttttttttttaaaatttttatattttaaagggaaaaaaaataaaaaaaaaaaaaaaaaaaaaaaaaaaaaaaaaaaaaaaaaaaaaaaaaaaaagaaaaaaaattaaataaaaaaaaaaaaaaaaaaaaaaaaaaaaaaaaaaaaaaaaaaaaaaaaaaaaaaaaaaaaaaaaaaaaaaaaaagaaaaaaaaaaaaaaaaaaaaaatataaaaaaaaaaaaaaggggggggaaaaaaaaaaaaaaaaaaaccccaaaaaaaaaaaaaaaaaggaaaaaaaaaaaaaaaaaaaaccccgccccaaaaaaaaaaaaaaaaaaaacgcgggaaaaaaatacagcacgcccccgcacaaccaaaaaaaaaaaagagggtgaacaaaaaaagagaaaaaggggggggggcgcaaaaaaaaaacccgcccaggggaggaaaaaccaccgaggagggaaaaaagaaaaaaaggcgggggggg

SEQ ID NO: 14765 - DNA, 512 bp, Gossypium hirsutum
  Clone ID: LIB3829-036-Q1-N6-A5
agcaaggagtttatttaacagtacattgcaatccaaacaaaagtagtctccagagcctataaaacattcaacacaaaggagaaagaaaccatatcatggaaatctccatcatctcagctaaagctttgtttgcagcagcttagtagacgtagccctttacgaacattcctttcttggcctcttctgattctccctcgccggggtatttcccgagctgagcgagtgagttggctttggcacggacaaggagtgcatcctgagcagccttaacgttctcgggtctgcctccccatgtcttcaagcaagtgttctggagagctctggcatacgagaacgagacgtgccatgggtttggagattggttcattgcgttcaagttgagggttgcttcaacctcggattgtccgccagacaagaacatgattccaggaacagctggggggattctcctgtggaggagcttgagggtgtaatcagcaacttgctgtggggtggccttgtctttgcattca

SEQ ID NO: 14766 - DNA, 530 bp, Gossypium hirsutum
  Clone ID: LIB3829-036-Q1-N6-A6
aataaaaaaagacaaaacttgagtagaaaaatagatccaaagttaggacacagccgttgaacttgaaaaaatagcaactatggtcctatttacacacacacgtctgtctcgtctcggtcaagtctcctgttttaatgggctatttgtagagaattttgaaaaaagataaaatgcttaaatcatgaagtaggcttttcataattaagaattatgaccattaatatttgtaaccggagccagattgtggtggtgcaggtggcatacggttaggggtacgacgactgttggaccctgatcgagaattcacgtcaccgttttgtgttggaccgttagagccagacctcctgtaatccacagggccgttagcagcagctgcatcaaatgcagtcctccagtcgtcaccaactgagccaccacttgttctcgggctactttctgccccagcgccactgtcagaccaatcagaagcagaagcagctcgattgtcatgtatgctaagttggcgcgttaattttgaaagaagtgatgac

SEQ ID NO: 14767 - DNA, 517 bp, Gossypium hirsutum
  Clone ID: LIB3829-036-Q1-N6-B1
gagagaaaaaataatgcattggttgggattgattaaagactgctttgaattttcgggcgaaattgacaagaggacttacataacattctcttgatttacaatagaccatttacctgcctccctggtttcagacaagcaaggattcctgcttactttaactgaacatagacaggatatgcgctgtgaaaaagccaaccagctgcaactgaaggaattaaggaaaaaaagttcttttaagaaaatgacgactgcaacctttggctctctatatatggaccaacttcagtaaagctgggtgcagaataacactggatgccaaaggcacaacgtagccaatattattctttcttaaacattgtaaccattattcacctggaaaggcttaccgctcatgtactgctctgagcagaattaacatttgccgctgcagcatatagccgcgggcgctttattgcttgcctttgagttgcccttaccatgagggttgttatcttcagggaacttcatcagagagcct

SEQ ID NO: 14768 - DNA, 531 bp, Gossypium hirsutum
  Clone ID: LIB3829-036-Q1-N6-B4
cctgaaaacataactttcagtccagctagtatgcttgatttgaggagaaaatggaaggaggtggggggcactaatgtctataacaacagagtgagtcagttatcaatgaaaccataaccaagtgatggtcctcttgagttctgtcaagcttgagagccagaggagcctaaaaccaaagcttttagcgccggcacttggccctccaaaagctcctttttactcaaaattctatcagatgaacagtctgcttcatcaccagctgcagcagaaataagtgctaaaagtgtcactgttgcagtttggaaatctgtcaagatcttgtatgctgaatcatctagtttattcttcaatcgagttacagcaacagaaattgcccgtccaggagcttgaagagctctactgtgaacctgtatataaagtagggaaacaactttcggcagaagagaaactgggtcagtttcagcagatacttgagaagtcaaatccttgcgatatgaatgcaagagagttctttccaattttttgtcaagc

SEQ ID NO: 14769 - DNA, 270 bp, Gossypium hirsutum
  Clone ID: LIB3829-036-Q1-N6-B5
cttacgtggcgctgttcaatcaggcaaggctgtttagaggaaccactttatgtattggacaaggcattaggagaggccggcattgtaaagttcgcctcaggtgtagcaaatactccaagcaaaaatctaacagctaattggcgcaccatttcctgaggctttagataaggcgggaaacaagccaccctaaggtgccctagaactcaaactatactttgtgagggaagtgaactggggaatctcacatgagctgttatgcaggatagtcac

SEQ ID NO: 14770 - DNA, 522 bp, Gossypium hirsutum
  Clone ID: LIB3829-036-Q1-N6-C1
ccgaagaattcatatcttgattaaggctactagagtttgaaaattcaaattagcacgtcttgttttcctcagagactgcagctaacacctgctataattgcatattgatgaagaaagcatacatcacagaccgaccgacaatacaatttattacaggtactttaattttgggtaatttttattttccctattgaagaaaatttgttcaaagcttaaaatagaggacttgttgatttatccaaaaagtgctgcaaatcccatcttccatgactgattgctgagattataccctccatcgacaggcacgttaacaccactgatgaatttagcctcatcgcttgccaaatacagtgctgcatgtgcaaaatcttcaggttccaatacggtgcctttcaacacagctgaagccgcaatcatctcctctcccttcttcttatcgagcaaccccagtgttgtttggaacaatggggtcacagttgcgtgaggtgaaatgcaattaactctaattccatgctcacctaa

SEQ ID NO: 14771 - DNA, 453 bp, Gossypium hirsutum
  Clone ID: LIB3829-036-Q1-N6-C3
aattcaaaaattcttacagtaatattaaaattaacaatgttaaaaatattcttacaacaactaaatcactctaaaatgtttacacaatcacctcccaaaaacaggtgcagcagtaaccacaagaaaaaaatacacaaatccatacacaacagtttttggcaatcactttttcaagagtaataccgaaagaataaccccctagtttcaacaaaaatgacacattacttagaagtctccttgctttgtcttcagtttcaaatcttaactgagatcaaaaacccattttgggtataaacttttgtaactatttattaaatctgcaatgtcgttttgatgctttggttcaatattagctgaagcttctctaagttcatgttcatcaacgacattgatatcactgagtttacgagcagatttcttcccagaactgcccatttctttcggacgcgtggg

SEQ ID NO: 14772 - DNA, 521 bp, Gossypium hirsutum
  Clone ID: LIB3829-036-Q1-N6-C4
aaaccaaagcaaagtcataaaaaactttttcaaaaaattaaaaacaagcatatagcgttccaactccaaagaaacactactgaactcagaagtagccagcgacatcaaaatagaaagcagattgaaaacagtttccttgagatctaaactaaactaggagcactggcagagaaagtagctgctcaatttcccgagcttgatttgtcttatgaccataatcacctgtaatcatcttcttccattccatcataacgatcacgatcacgatcacgatcacggtcacggtcagaatattgatcataacgatccccatgagcatccagatcatattctcctcgacctcgatgatgatcatagtattcatagtgttggtcatctaggtccgaccgcctatgcccatgatcatgctgctcaaaccacccatgatcctcatctggctcaccatgatcataatccctctcactgtgccgatctctctcatgtttggactcgacacggtcataatcagattccctatccct

SEQ ID NO: 14773 - DNA, 528 bp, Gossypium hirsutum
  Clone ID: LIB3829-036-Q1-N6-C5
attaatcaacaaccgcaaattaagttaaacgaaacgacaatacaaggtttaaacataatcctaatccttaatcaaaggatagtaaaatagagatcaaaccctacccatgctttaaaaaaaagaaactaggcaccatgcaaacattattagtttcgaaaatggatctaatgaaacattggcttcttatttaattaagacttaaacctgagctacttaatttttgctgagttatttggtctaactgtgtggccattttaggcgtcaaataattcttccaatctccaaccttccctttccgaaaataaatcttgttttgaatctccaaattcccttgcccttcacgatgtatcccacttttattcacttccaagttgcttagattctcaaaactacacatctttataatcttttcaggtacccctttttgctgttcctctgttgagaaaggacaacccataaactctgccaatttcttaagatacaaaacagtatcttcattcatttcttcatatttcaagaacataaact

SEQ ID NO: 14774 - DNA, 356 bp, Gossypium hirsutum
  Clone ID: LIB3829-036-Q1-N6-C6
aaaggaacagaccaccattatactcgaagacgcatcctgaattctgatcgtcaaaggacgacacgggactaagacctagttatcacatggggctacctgaccagagagttactaccacttctcaccaccaaacagttctttagcttctatgaatttcccactctacacgctcttcaatctgtgagacggatccatatgctatgcatttgcggcccctataataccatggatccatagattcagaaggagaacgcaaaggactactctgtggcagcaacagcagatggcccttccaccttgaatgcagcaccccatatctgctcttgttcagcaggcactgctaagaactggatctt

SEQ ID NO: 14775 - DNA, 282 bp, Gossypium hirsutum
  Clone ID: LIB3829-036-Q1-N6-D2
ttttttttttttttttttttttttttttttttttttttttttttttttttatatatatgtttttttaatttttttttttttttttgtttatattgggaataaagaccaataactgctaaaaaaaaaaaataagaaatagaagggagggggaaaaagaagaaaggaaaaaaagaggaaaaaaaaagagaagcggggggagaaaggaaaaaaaaagaaaaaaggcacaaaaaaaaaaaggaggaaagaaaaaaaagcaaaggcggggggaaaaaagaagggaac

SEQ ID NO: 14776 - DNA, 526 bp, Gossypium hirsutum
  unsure (1)..(526): unsure at all n locations; Clone ID: LIB3829-036-Q1-N6-D3
gagctaaaactatgcttcataaaaaatcaanaatagcattgagtcattacaatgtacaaaaggtacttacattccaatggaacagaacatcctattccacccaacatcgaacataagatcaattgcagaattcacccaaggtaacttgtccctgattcaagcttgtcggcactgtagaaatgcagcaattttagaggcattactttctcctgaatcatctctgcagactgagaaggaaaatgaaagcctgttgaacagttctccaaaatttcagggtttttcatccatgctctacgagcatcacttactttaatcttatatctaaacatctgagaaagagagacatcgggcttctccagctcatctccctcaacctcaataccggtaccttggcactctgggcagagtacagaattaatcagggtccctgtaggtttagtctctccttccttccccatcttcttgcatttggttcgatttttcctcctagatcttcgtcttgatttaggattaactgaatggttct

SEQ ID NO: 14777 - DNA, 525 bp, Gossypium hirsutum
  Clone ID: LIB3829-036-Q1-N6-D4
aagtacagaataaaataatattgattcctcaaagatttgcgtgaaactgtaaaaagggtaacctgacaaaaccatatcgaaacatccatagcttcccgcctcttggaaggatttttcggcaggttagttatacatttaataataaacacaaaataagtaccatcgtaaaaacaaaatgagaatctcacatatcacaaccatcaaaatgcaagtgatctttagtttttcggcttcattactaactagctcgagctactaagtattgccaccaaatcactctttttcattttggaaaatccctttaacccgcgagattttgcaagcgctctgagttctggtagtttcaaagcactcaaatcctcatgctcaatatgctgttctctgtcctcctcatcaacatcagaagattcatcctctgacaactcatccaacatgtcagattcttgatagattgactcggattcaagctcgggatcggattcaaactctagttcttcctctaattcaggcacaccattgacagca

SEQ ID NO: 14778 - DNA, 515 bp, Gossypium hirsutum
  Clone ID: LIB3829-036-Q1-N6-D5
ctctaattattcccaacttttattgatttatagaactgccctggctaacactgaacattacaacaggaccaaacttttctttatatggtacaacagtacgaacttgaaaaaaaaaaaagtggaagcaaacaaacaacaaacacagactcaaggcagtagcagagcacaaaaagtcgctcctttcatttaataggatcgataataaggatcatcctgggtacctccgcgggtgctccttctagtcccagcattgttaggcgccgcacttgggaagtcttggtttcccgttgtaccgtaagcaccccctgtatctccgccaaaccccatactgctgaggtcatcttgcctgcctgtatcatacccactacctgcggtggggtacccacggttgtcatgtccaccggtaccgccatagccaccagtatcccctctgttgtacccagctgtggtgtagccagtaccaccaataccaccaccaccagcattggccagccgtggcgttatgatggcgggcc

SEQ ID NO: 14779 - DNA, 511 bp, Gossypium hirsutum
  Clone ID: LIB3829-036-Q1-N6-E1
atggaaactgattaataagtatctttgatcactgattataaaacaaagtagcaaatccaactttcagccatggttaaacataatagagcaacgacggaaatatttacaagcaacacaacactatctttacgtaatggaggctgagagagctagtgactccatgtttccaaccatctttatataaagttatacctaacacagtaatgggtgtatatttgaagaaaactgtcaccccattccatgataaggtatttttatgccgcctcggcaaagccaactctctctttaccgaaatcgaacacggtgtggtagcggcccatgaaaacatctcccaaaatccagaggggtccacgaggaggaggaacatccaaagcagtaaagccactgatgcactgagcttgaggaccttcacccaccttgagaatatactcttcaggggaaaggtcgaaaacttcgtcaccaatagtgaaggaaacagttggcatggacgatagacttccacattcaacag

SEQ ID NO: 14780 - DNA, 527 bp, Gossypium hirsutum
  Clone ID: LIB3829-036-Q1-N6-E2
ctctaattattcccaacttttattgatttatagaactgccctggctaaccctataacattacaacaggaccaaacttctttttatatggtacaacagtacgatcttgaaaaagaaaaaagtagaagcaaacaaacaacaaacacagactcaaggcagtagcagagcacaaaaactcgctcctttcatttaataggatcgataataaggatcatcctgggtacctccgcgggtgttccttctagtcccagcattgttagacgccgcatttgggaagtcttggttccccgttgtaccgtaagcaccctctgtatctccgccaaaccccatactgctgaggtcatcttgcctgcctgtatcatacccactacctgcggtggggtacccacggttgtcatgtccaccggtaccgccatagccaccagtgtcgcctatgttgtacccagctgtggtgtagccagtgccaccaataccaccaccaccagcatggccagctgtggcgttatgatggcgggcctcttgtttcctc

SEQ ID NO: 14781 - DNA, 511 bp, Gossypium hirsutum
  Clone ID: LIB3829-036-Q1-N6-E4
gtgtgttcaatatctcaatttatttcgctattttcttgttcgttgcttaatcgggttaaaatcctaacagtgacaatgttaaaaacatttttacaaggagaaaactaatgtttaagatggcggcttttgcgactgttgaaacatctgcatcatttactgagagctggagctggagctcttcgtactgttgaaacatctgctgctattgctgctgcctctgactccctcgctgctgccgctgcctccttctactgctgcctccactctaagttattgctggagttcttcatattttctttgaacctcaataatttgcttaactgggctcgcttgcatctgagctatctggtctcttaacctctgaacttcagcttgagtttgactcccggaaggcatgtattgttgggagccggatccaaaatattgggtcggggtaacaccaaatccttgaaattaaacccggccgtacctttcagaacccaaaactcagcgataattcgagcagtttttt

SEQ ID NO: 14782 - DNA, 426 bp, Gossypium hirsutum
  Clone ID: LIB3829-036-Q1-N6-E6
aaatataatccatgttcttcaattaatacttagccggaatattcaacaaaggtggcagccacgacactccattgacttaaaacaaaacaaaaacccctcttttgcttattttacaaaacaggacaccatttttatatatagctgctacagaatgcatactatcttaaacacacaagatttcacgttccccagcattatatataactttacaaaaactacatatagatgaggaagctatgtatatattactatgcgttgacattctcattaagcctatcagctgccgccatagatgctgccactcctcctggatgtggggctacattcggattgtgccttatttctgcacttaccactacttatacatcttgccttgccactgctttatccgccggtaactttgtcgctgcacccgttataacttga

SEQ ID NO: 14783 - DNA, 517 bp, Gossypium hirsutum
  Clone ID: LIB3829-036-Q1-N6-F1
gaggaaagtacagggaaatcccctcacagttatccattgaacttcaattttcaaatgaaacaagtagatgaactaaattactgtaaaataaaagtagaggaaatgtatttaaaaaaatccgaaaactaatggaaataaaagcagaactaaatttcaaaaatctgaaatgtacagggactaaaatatatttgaacatgataaaaaaatgcaacggtgagctgaaccaaaaggaaaattgatagttactctaccaagaaagaattctgatgaagaaattgaaaatttaacaattgaaatatatagtaattcgtttaaaaaaaaacatcaaataaaaaggacctaaaaacatgatatgattacctgaaagactgcagaactatacctgatctcattcaaaagcattgcttccaaaatagatgattagggcaaatggcaatacaactgatgaagaactatttttgccccaaaaaagagctttaattccgacattatatcacggtttgtggatcttgaaccc

SEQ ID NO: 14784 - DNA, 527 bp, Gossypium hirsutum
  Clone ID: LIB3829-036-Q1-N6-F2
acaaaaaaaacatgcaagtatataaaagtacacaataattaatattcaaactaaaaaaaaaagctcaaaactaacacaatttcaaatgttctcaaatggtgaaaggcaaaaaaaaaaggacattttgatcttaatgatgaaatactcaaaagcaacaaaattttaggcagctcccttccccctctttctctgcatcttcttcatgtaaaactccagctctttgccctccaagatatatccatcagcacggccgcattgaccaggccgtgaagagatgcaagccagtaaacgaccactaccaaattgctcctcgatatgggggtcaagtgtgcgactctgctgacgtttctccagcttcctcaagacatggctgctcttcttcacttcctcagtagcagtttcaccttcctctccttctttcttggctcctgctgctgctttcttcttgcgaccaatgtcaacaccatagtgctggagataccattgcttgaatggagcagcatcgacttgaacaatagcactcttca

SEQ ID NO: 14785 - DNA, 495 bp, Gossypium hirsutum
  Clone ID: LIB3829-036-Q1-N6-F3
aaaaaaaacaaataaaggatacaaatttaaaagtatagtgtccatttacaaaatttttgggccaaaaccaaaccaaacccaaatattaaaattaaataccaaattaattcctaacccaataaacctagcccgaatggcctaataatcctaacccaatgaacccaaaggcccaaatgcaaaaatggcccaatggcccaaatgacccaaaggctgatttcagaaggggaaaccctagtctgctgattagcgccgcaacaatggacttggcccctagccatccgatttcaaaggaagtttcgggaatgcgctagagcagcgccagagggtcgggctcccacgagcaaattttcacgcttggctttcacgtcacaagggtcttctcctccatataaccatgcttgcaacagaatacacgagaaacaaccaataaaatacatagccaaatgacagaaggaaaatatgatttttattttttatttattttataaatctggc

SEQ ID NO: 14786 - DNA, 527 bp, Gossypium hirsutum
  Clone ID: LIB3829-036-Q1-N6-F4
ggataagatgataagggacacactaaaataaaaaataaaaggttccacagaatgtagtaagatcaggttgatacttgcacttaaacacctgaaattcagttatctacctgttttttcttccattaattctaaagatacagtcatggacatctcaaatcccattttatgtaatggcaaacacgaaacaccaaatgtataaaaggtgcactataatcactccgctttagattcggagcaggttttttcgtacaagccataaataagtgtagactttgacatttggggctctctttccagaactgcaatcacatccttaatggaaatagtacgagccactctagcatgggccgtgagtgtcgtaccttggttccggccaaatttcttgcttgtcccagatccatgaggattgagagggcccctcttttcagattcttgattgtcctttgtacttttcccagatgcagataaaggtctgcggttcgcatctttacttgcttgtgaaccagatgccgcatccgttcctccct

SEQ ID NO: 14787 - DNA, 527 bp, Gossypium hirsutum
  Clone ID: LIB3829-036-Q1-N6-F5
aatgtaaaataagaatttatttcaaacggaatccgtcttctaatcatacaaacagcagagaaccattgaaaagaaaatcatgaatgagatcaaaagaacaacttgacaaatgtttcatactgcactagcggcaagaattggagaaacaaccaagtgaagcctactagcaatgacccaagtttcggaactttgcactctattctgctcgggattgaccagcccgggaagagagaatgataccgacaatgagtccatagagagccaaagcctcagcaaaaatgagaataagaatcattccaacaaaaagctttggttgttgggcattggctctaactccagcatcgccgacgattccaatggccataccggcagagagaccggcgaggccacaagcgagaccagaggaaagatgagcatagccatcgaacaggtagtaagatttggcctttgggttaatcccagtgctgataataaccgcaataatcaacccataaatacctaaaactccagccataacaacgggcacg

SEQ ID NO: 14788 - DNA, 482 bp, Gossypium hirsutum
  Clone ID: LIB3829-036-Q1-N6-F6
aatccgagaaatagagattcctaatttcgaaatttctcataaaaattacaatacaatgtgcaagacatgtcttatttatccgtgaaactggtaaaaaactaaaaacgaatcacgcagcatttttgagattttttttctcctatgtggaccttgaatacaacttagaaatgatggggatccaccatttagccttgccttacaaacaataatctaagaaccaaacaaccataccccataaaaatgcagacaaaaggactccagtaacaacaatgctcgaggagatttgcacctactgctcgtaatggtctctcacttaggggaaagaacatcttcccatggatgacggtataatggctgcttcagtctcttctgatcgaaagtgtgcccaatcaaaccaatggatcgtgctagcacaaagagcccatttaggtggccaatttcaacaacctcatcaatatgttggtttgtgaacattccactac

SEQ ID NO: 14789 - DNA, 434 bp, Gossypium hirsutum
  unsure (1)..(434): unsure at all n locations; Clone ID: LIB3829-036-Q1-N6-G1
atggggggnaaanncccnnttnaatggggaaaggggcaaaaatggggggcaaaaaaaggggcaaaacaagaccaaggggaaaaaggccccaaaagggaaataaaaaaaaaaaaggggggggaaaaaaaaaagggggtgggccaaaaaaaggcaggggaaaaagttttggaggcaccaaaaggcccggaaaaagctaaaaaaccccaaacctccaaacctttcttcttcccccaaccacctttttttttgggcggggtcccaaaagcaaaccaccccgggattcaagaaaaaaaaatgggctgggggggcggaaccttcggaaagggaggcaggggaacccggcctgacccatggggcataaacaaccccgggaaattttaaaggggcaacaaaacccccgggcttcaaaaaaaaaacggaaaagggctgcaaaa

SEQ ID NO: 14790 - DNA, 361 bp, Gossypium hirsutum
  Clone ID: LIB3829-036-Q1-N6-G3
ttttttttttatatttttttttttgagttttactttttatttgtgagctattcattaactttctgaaaccattaactttattaagttttcttcccataatggagagaggaatgcctgttaatttcaccccgtgttcccacaatgccgtatacccacaatggctgcaaactcggcaactatcttgcttctatacagcggagaaagatgctgataaacacaagcgggataaaaatacacggaagctagaacccaggtttaaatcaaataataattataggaaaagcatacaatgcagccacttacttactttccaacctgcctatataagaaaaacaaaagcagccaatcgaagctgttgctt

SEQ ID NO: 14791 - DNA, 524 bp, Gossypium hirsutum
  Clone ID: LIB3829-036-Q1-N6-G6
agaaaaaaggaattgacggtatacattaatctccatacgttttcagtttcataaatctcacactaactttgattttggtattaaataagtgtacaagtaattttacccccagtcattccatgaaattctggtaatgaagttcaatgagcaaaatggttagcaaaatttaatgcctacatgttggtataccatggaatgacagaatgcaaatgctatgttgaagatctctctgctctaaccaggtggacggcaagctgtttaggaacatgtaaggaaatcaaataggctacctcctcataccggcaggccaagtatcaaaagacctgtcctgcctacccggggttgaataagtatacagtccccattggcctaaagtataagcggctcctcaaatcccttcccctgtccgttgcaaaactcttcgaagctcgtctgccattccttgcaataaaacaggtttctgaaggattgcattcattcctatttgtaggcatctctcccgcacatgatcctcagcactagtg

SEQ ID NO: 14792 - DNA, 497 bp, Gossypium hirsutum
  Clone ID: LIB3829-036-Q1-N6-H1
tttttttttgttttttttttttttttttttttttttttttttttttttttttttttttttttttttttttttttttttttttttttttttttttttttttttttttttttggggggggttttttttttttttttttttttttttttttttttttttttttttggggggaaaaaaaattttttttaaaaaaggggggggttaaaaaaaaaaagggggggggggggggggtttaaaaaaaaagggggggaaaaactttttgggggggggggggggaaaaaattgggcaaaaaaaaaaaaaaaaaaaggggccaaaaaaaaaaaaaaaaagccaaaaaaaaaaaaaccccttgtttttttttaaaaaaagggggggggggggccccccaaaaatttcgggggggccctgggggggaaaaaattttttttaaaaaggggggaaaaaaaaaggggggaaaaaaaaaaaaaaaatttttttggggaaaaaaaatttttcctcc

SEQ ID NO: 14793 - DNA, 474 bp, Gossypium hirsutum
  Clone ID: LIB3829-036-Q1-N6-H2
ggggtcagtggccctttatgcggttttggtatcggtcgacgggcgcagagcgaagttaatagccccaaaactgactgagacgttaagggccataacccatctcatggtatataagcgccactgacttttcaacagaatgaaaaggcccactgaacaaataaggggttccggaattactaactggaagtacaactgcgaggcaacaatcccccgagcagggggaaccagtattacaattgcatatagaaaaaaaacccgcacaaccggggggaaaacagggaaaccattcgtgttttaaagccaacaatttacggcaatgtggccatacctgggtgggaaagaaccttttccatttaaagttgattgaaaaaatgaactgagcaaagcctgtacttaacataccccttattgaacaacccccagaaaaaagattgggttccaagcaccaaacggcacacttggactccacctttg

SEQ ID NO: 14794 - DNA, 527 bp, Gossypium hirsutum
  Clone ID: LIB3829-036-Q1-N6-H3
gcaaacaaaacattgtttttttatagaaataattaattaaaaacatgaaaatttaaaccaggcttaatgacggtttaagataacataaaaaagaaaaagaaactattgagaaataaaacagtaaactcagttaacacattaggggaataaacaatgaccagttcacaccataataaaccacagaacagcagagagcacgtacgggatgtagctcactgtcttttattctaggaaacacgacacaggaaagccaaacaccaacatataatagaagacgacgctaatatttattgcactagaagtagaggcttaacatggtaaagacaccatacggagagcttagggattcactcgtcttccgattcagactcggcagtctggagccactcgatgaagggcttgaggttcttccatatctgagaacccttattgctaccagctatacccttctggtaccactccatgataaactcttcttccaaaatatcatcgtcatacagcactttaagaaccaatgccaccttctt

SEQ ID NO: 14795 - DNA, 531 bp, Gossypium hirsutum
  unsure (1)..(531): unsure at all n locations; Clone ID: LIB3829-036-Q1-N6-H4
agaaaacataacaggcataatattacagttactgtttacttatacagtgccaaanatctgaaacatggaaaaaactttatacacgaatcaaaaccccagcaaccacaacttgttactctcttcctacctattggatctaacatgttaataaaagctagaagcagcaatccaactgacactaaagctggtgctacgcaccgggacgtggaaatacagacttgaaacaccacatgatacaagaactagcttacatggaaaatgcagtttatccgaatgttaacctccgttgggactatcttgactcatactgacacagctcaacacacgagagatgacctaagggatgtggcagttgggagatttgtgcatgatgcccatcggataactgattcagacacgataaaatcaagttgttctcgctcaccgtgaccgatggtgcggtttctcttgctgtggaaggccaataacttggaaccgttcattcctcctgtccttccgaattcagctgtcttggtctccttttctcttgcc

SEQ ID NO: 14796 - DNA, 519 bp, Gossypium hirsutum
  Clone ID: LIB3829-036-Q1-N6-H5
attcaacatgttttcactccaacaaaataataataattgtaaacaaaatgggaatggtgaagtgaggaatgcaaagtttttgttggcatcaactatggtttagaatggttcatatttcatacaacactgccaaagcagcccaaagcacccatgcgcttccagtctgctcttttcgtaatcatcgtcgtagaatcttttgataaactacctatcaactggttctgataaagcaaaggtatgcttacttcttgtgaaaagggaagaccatccaacttcctactcacacttgatagaacggtaaatgtgtcgaacaaagagcagagatgcacggaagccaatagccccaagcatgaggaaaaagccatagcaaatgcaggccatgtacccaaagaagaacgaagtttgcatgaagcctgacatgtctgaccgtgcattgtaataatacaaacagtaggcgtatatgaacagcccggtagacccaccacaaaggaaggacctccaccaccactcatggtcttc

SEQ ID NO: 14797 - DNA, 526 bp, Gossypium hirsutum
  unsure (1)..(526): unsure at all n locations; Clone ID: LIB3829-036-Q1-N6-H6
aagcaaaaatattcgcgtctccgataacaaaaagtgattccaacttccaacagaaattaacatcagaatcccttacaaaataaaccaaaaaanacatcaaccactagttttttaaaacaaaacccaagtttggttttttaattcattctcctaattaattcgttgatgtaattctcacggttgccggcatctccaccttcgacataatggttcctcttcttcttcagaccacccaatggtgccttgagcttaaatggccaaaggaagttgttggcttccttgaaatgaggtcccacagtcattatctcatggataagatcttcaacacaaatgatgccgaacttgcctagtgcctgctcaacaattgcgttgtcggtcaaggcaactcgccgcttgttcaactttccaaaacctcttttgtaaatgagttccctaacactcttgagattcgggtatccataagtcacataaggttcaacaaggtgaagcatgttcattgttgccttgttcactttaagaaaaacac

SEQ ID NO: 14798 - DNA, 600 bp, Gossypium hirsutum
  Clone ID: LIB3829-017-Q6-K6-A1
atacttgcatataacgatctcccctgttttattctctgtaaattttataacttgggaacctagacacccatggctactgtttctcaattgaacaactttccatgcaagaccttcttaataatcccacaaaacagtaactttacctcaaagcttccggttctgcctctaaactctacaaaaccaactcagaattcgatcaagaaatctcaatttttgacccagaaatcagtccagccaaggcctgttttccagatccgtgcttcggacgccgacgatgaatggggcccagacaaggaggagccagttgtaatcgagagtcctggagtggccgtagcggaagagaagaagcctgacgatgcgggggaaatagagagcttgaagaaagctttggtggattcgttttatgggacggatcgtggcttgaaagctagcagtgagaccagagctgagattgttgagcttataactcagctcgaggccaagaacccgactccagcaccaactgaggctttgcctcttctcaatggcaaatggattctcaagtacacatcattcccgggtctgtttccactgttgtcaagggtcaatttccattagtta

SEQ ID NO: 14799 - DNA, 321 bp, Gossypium hirsutum
  unsure (1)..(321): unsure at all n locations; Clone ID: LIB3829-017-Q6-K6-A10
accctttgctcgaattcctcagagtccattgccacaagggcaagaacatgatgttgaatgacagaattcagaacttgaatgctcttcaacatgttttgaggaaagcagaggagtatcttggtaccctacctcctgagacaccatgtgccggattcgaacaccggttccaggaaatcggtttggaaagaggttggggtgacaccgcacaacgcgtgctcgagatgatccaactccttttggatcttcttgaggcacctgatccttgcacccttgagaagttccttgggagaatccccatggtgttcaatgttgnnattctca

SEQ ID NO: 14800 - DNA, 328 bp, Gossypium hirsutum
  Clone ID: LIB3829-017-Q6-K6-A11
gcttacttcttttccgtttttggaagccatggagtacggggcagtgcattatattttagatgtcttctaatttgctcaagttaaatgttggcctttatttaagaaattcgggatgatgtatctttaaatattacagctttcacgacaaagggttgcacaacaatgttgccataattacaggttgatatgctccaggcacttgttgtatctatggagcctagggagggccaaattcaagcttgattatgttttataagatttgtttatctagttaaaaccgagtctaattagttcgaaaatacatgaattctatttattttatccagtg

SEQ ID NO: 14801 - DNA, 604 bp, Gossypium hirsutum
  Clone ID: LIB3829-017-Q6-K6-A12
aaaaagcaaaattaggaaaggacatattgaagaagtttggatggttagatctagagagaaaagtttatgcacaagaggatggtttgttcatctctttccctgtgaccgagaagttttgtgctatcttctcagaagacagatttgaagttttgagtgatcatcatccatctaaactatttagagctgaaggttcactcttaaatgacatgtcctcctcagtagctctggacattcttaaggaatatggtgctactaagcttccagatgagcttgttcaaaaaagaaaagcttgtaaatctcccttaaaaataatgactgaagctgttgcctctttgattaggcaaaaggggttatcagataagcttctggagcagctaccaaacaggtgggaacggattggtgatattgttgtgctaccgatttcatccttcggggacccaatatggaattcaattggagaggagctttggcccattattgccaaatcccttaatacttgtcgccttgcacggcagggccgggtcactgcaaatggtacaagggacagtactttggagattcttgtaggagataatggctgggttgatcatcgtgaaaatgggat

SEQ ID NO: 14802 - DNA, 588 bp, Gossypium hirsutum
  Clone ID: LIB3829-017-Q6-K6-A2
gatcaatttatgtaaagttagcaaattgtcatttgaaattagaaagcacccatgaagccgctcaagcttttgttagtgctgctcattgctataagaaaacatcgacaaaggaggcgatatcgtgcttgcagcaagcagtgaacatgttttgtgatattggaaggctcagtatggctgcaaggtattataaggaaattgctgaattatacgagtctgaacaaaacattgagcaggccattgatcattacgaaaaggctgcagatttcttccaaagtgaagaagtatctacttctgccaatcagtgcaagcagaaagttgcacaatttgctgctcagatagaacaataccagaaagccattgagatctacgaagagattgcacgacagtcacttaccaataacttgctgaagtatggagttaaagggcatcttcttaatgctggcctttgtcaactctgcaaaggcgatgtcgttgctatcaccaatgcattagagcgatatcaggatctggatccaactttttctggaacacgagagtataggttattagctgacattgcttctgctctggacgaagaagatgtcacga

SEQ ID NO: 14803 - DNA, 580 bp, Gossypium hirsutum
  unsure (1)..(580): unsure at all n locations; Clone ID: LIB3829-017-Q6-K6-A3
caaanaatgaatatctgatattgttgatgggaaattggggatagacagctcttgtcttgttttgatggcaatccactagttttagtctgtagtctttccgtaattatagctataaacctccttccaacttaaaaataaataattttaagttcaaagccaagttttaaacttctcgttaagtagaaaatcagatgcagagtgaccaacaattttacccccaaaaagcagtgcccatacttgcagatcaagtgggcaataattacatgcatataccagttgcatctgcttttggaccagtttttcctccatgtgcaaaacccttgccgcccctccatggcattgagtttcaaccctctgaggtttgtcccaagaactttgttattttcaatcagactgataataggaaccaagtcttgttcaacccggctatcacaaacaagtttcatggtaatggattaaatgtttttgcaaattacaatgatggaaaatatgagaggaaagatgtttatgatgtgggagaagaaacatcctcttttctgaaagaggattcggatgatattgatgcactcctcagctcgga

SEQ ID NO: 14804 - DNA, 583 bp, Gossypium hirsutum
  unsure (1)..(583): unsure at all n locations; Clone ID: LIB3829-017-Q6-K6-A4
attttcttttgcagttgctcctttgtgttctcgaactcaagtatgctgaagatgtttcttctgccatagtatttggaagagagcttgtgaactcaccagccaatgtacttacccccgctgcactagcagaagaggcttcaaaaattgcttcctcgtacagcgatgttatatatgcaaacatcttgaccgcagagcaatgcaaggagttgaagatgggatcttacctatgagttgctgcagcatctgataatcccccttatttcatccatttgtgctacaaaccctcgagtggacctattaaagccaagttagcattagttggaaaaggattgacttttgacagtggtggctacaatatcaagactggacctggttgctcaattgatgtcatgaagatagacatgggaggntctgcagcagttcttggtgcagcgaaagctctcgggcaaatcaaacctcctggagttgagggtcattttattgttgcatcttgtgaaaacatgatnagtggaacgggtatgagacctgnagatatcctnacagcattcaatgaaaagactattgagggttaataacactgatg

SEQ ID NO: 14805 - DNA, 607 bp, Gossypium hirsutum
  unsure (1)..(607): unsure at all n locations; Clone ID: LIB3829-017-Q6-K6-A5
ttatgggatcaatgatgccaaactttatggaaggtcatattagctcaaaagagaaaattgacattgagatgggaaataggcttgctgaagatactggttattcacttcctgaaattttgagaaatttggaatttgatgattttgaggacgaattgatgataaagcaggaaggggaaagagatatggattcattgtttcttggagggcaagatatgaaaccatcagatgaagtctccattccggggggtgaaacagttagaactgagcaaagttcagcttctaaaaatggagatggagaatttatggaaagctacagtgcaagaaatgaaacagatacgtcagggaaaccaataatgtagcaattctcatccaacaaaattgtcgccacttcatgtagaactgtgatcttcgtgttctctctccttttaagttaaaattctagtgctttttttatttaaaactttggaggcaaacactggcgtaagtgataattaaacaagtttttgttaataacagctttgcttgggttgggttattttgaaattgatgtgaaggatctncttgtcttgtgaaatcgcagtggagtgcagctttggaggagtgcaag

SEQ ID NO: 14806 - DNA, 595 bp, Gossypium hirsutum
  Clone ID: LIB3829-017-Q6-K6-A6
gctgaacttctaacaggcaaacctctgtttcctggaaaaaagttgtccatcaattggatctgatgactgatcttttgggaacaccatctgctgaagccattgctagggtgcgtaatgagaaagctcggagatacttgagcagcatgcgaaagaaaaagccaattcctctctcccacaagttccctaatgcagatcctcttgctgttcttttgttagaaaggatgcttgcttttgaacccaaggatcgacctagtgctgaagaggccctagctgatccatatttcaaggggttggccaaagttgaaagggagccttccgcacaaccagttaccaagatggaatttgagtttgagagacgtaggattacaaaggaagatgttagggagctcatataccgtgaaattcttgagtatcatcctaaaatgttgaaagagtatctggaaggatcagagccaactggcttcatgtatccaagtgcggttgaccatttcaagaagcagtttgccttccttgaggagcactatggaaatggtacgactgcagctccacttgagagaaacatgcatctttgccaaggccatgtgtgttatattca

SEQ ID NO: 14807 - DNA, 315 bp, Gossypium hirsutum
  Clone ID: LIB3829-017-Q6-K6-A7
tcggttacaacactgatttgcggggccaaagaattaaaaaagcttgtcaaccttagtggacaactcgacaagataaaacatgtgatctgtatggatgatgagattccaactgctgcaagtggtagatgggcagtcacttcttttgctgatgtccagagaaccggctatgaaaaccctgttgatgctgatttacctattgcagctgatgttgcagttataatgtatactagtggaagtactggattgcctaagggtgttatgctgacacatggcaatatactagctaccgttgctgcagtcaggacatttattcct

SEQ ID NO: 14808 - DNA, 612 bp, Gossypium hirsutum
  Clone ID: LIB3829-017-Q6-K6-A8
cttcgccacccagctgctgcaaatctctctcgaaacatacctccggttccaacttcagctcaaaatatgtcaggggaagaagttgcggttgcccaacccgaggcggcgcctgcactcggtgagccaatggacatcaacacagccttgccccttgtggttaggaagtcacgagctcacggtgggctcgcacggggattacatgaagctgctaaggcaattgaaaagcacaatgcacatctttgcgttatagctgatgactgtgaccagccggattatgttaagctggtcaaggcactttgtgctgatcataatgttaaagtgctacgtgccccgagcgcaaaatcacttggcgagtgggctggtttgtgtaagatagactctgagggtaaagcacgaaaggtagttggttgttcctgcgtagttgtgaaggattatggtgaacaacatgaggccgtcgaagttgttcagcagcacaaggactaggtgaccggaggatggtttctttggtaaaatcatagctatttttctgggccatttatatttgtttgatagtgaactgtggattaatatgcctcagaatttcgttttctttttccgaagttgttgcaatgc

SEQ ID NO: 14809 - DNA, 592 bp, Gossypium hirsutum
  unsure (1)..(592): unsure at all n locations; Clone ID: LIB3829-017-Q6-K6-A9
cagnagcaaaacaccatgctagcaaagcagatcaaagagagggagaagacagtggcgcagcaacagcagcaacagcagcagcagccgcaatgggggcagcaaaaccatggcctcaacacatcatcctttctgctgccacagcctcctccctgtttgaatatcgggtagcacccctcattggcattcatcgttaatgatatctagagatgcatgaaaggcatatgttacttgtgatgcaagaaataaaatcctatcaactgaaaaccgaataattttgaaaacgtatgccaaagaagatggatccacataagctttcgttttctgttgtctataatgaagtggcaaaagcttggttaaaagatttgattgtttatagtttacaatttttgcagtggcacataccaggaagaaacaacagaaatgaggaggaatgaactagaccttactctggaacctatttactcatgccatttgggatgctttgctgcatgaaaatgggtacaattaatttaactatgcttttggttatatgtgaatatggacatagatccatgcactatggttcttttctttaaaaaaagaaacagcatga

SEQ ID NO: 14810 - DNA, 611 bp, Gossypium hirsutum
  unsure (1)..(611): unsure at all n locations; Clone ID: LIB3829-017-Q6-K6-B10
tgaagttattgcctgcattggggagactcttgaagagcgagaatctggctctaccatggctgttgttgctgcacaaaccaaagcaattgcttggaaaagtaacaaattgggacaatgttgttttggcttatgaacctgtttgggccattggaacagggaaagttgcaacccctgctcaggctcaggaagttcattgcgagttgaggaaatggcttcatgagaatgttggcggtgacattgctgcatcaactagaattatatatggaggttccgtaaatggagcaaactgcaaggaattggccgcacaacccgatgttgatggctttttggttggtggagcttccctaaagcccgagtttgttgatatcatcaaggccgcgatggtgaaaaagaattagaagttgaaaagcaggaattaaaggtgaaacagaaacaaccttctgggaaactttaatttttgtagttgagatctttccttggaacctaatgtctgttgaaaatttcccgatgtaataagccaaatttaactatgtgttttttttgcggtggttgaggcattgatcctcatttcngactttcccttgatttacctcacaaattgctattgcttt

SEQ ID NO: 14811 - DNA, 608 bp, Gossypium hirsutum
  Clone ID: LIB3829-017-Q6-K6-B11
aaagaacacctggcagttgcagtttggtacaatgaggacttgctcaataaccttagcagtcaaattgatgaacatcaaactacttcggaggtgagactgggaaataatgttgtggaaaacaattttgcaagtgaagatcttgctgcagatcagagagctgcaaagagagttcggaagccaacaaagcggtatattgaagaactttctgaagcagagtccaaagagtacagtggcaggtcaattgcttcaactaaaaacattgggtttagacccctgccttcaaaagctcatgctaggcctgctagaaatgtgtccttggaagggagaactgttatcacaaggttggattcccttggaggatttgggattcaagttccatgtgtttatcggattcgaagaagccgaccaaggaagaatgtcacagcacttttgaaatttcatcccagtggcatgggcatgacagctacgcttataaagaagggttttgacgtacatggctctcaaatggacaatgggagtatgaacaaagttttggaagccaaatctactcctgagcaagctccggaacagtttgtagctgaatcaaagaaagagacgacaccaactga

SEQ ID NO: 14812 - DNA, 602 bp, Gossypium hirsutum
  Clone ID: LIB3829-017-Q6-K6-B2
ttttaatccatgttttcttctcttttttttggtttctgcaatggtagttggtactaaagtttttaagagttgaatctgttgaagtgaggaagttctgtcgaattctttgtagcaaatgactgaagaacagaagggaaagcaggagaaaaccagcttgggtatgacagagaaagttgtagttgctgttaaggcatccaaagaaattcctaagactgctctggtgtgggcattgactcatgttgttcaacctggagactgcattacgttgcttgttgttccttcacatggttcaggtagaaaatggggttttccaagattttctggtgactgctcaagcagtagccgcaaatctcaatcaggatcaagttcagagcagaaatctggtatcagtgactcctgctcgcaaatgatcctccagctccatgatgtttatgaccctaacaagattaatgtcaagataaaaattgtttctggatcaccatgtggagcagtagctgtagaggccaagagagcccaagctggttgggttgtactggacaagcagctcaaacacgaggaaaaacggtgcatggaggagttgcaatgcaacatagtgattatga

SEQ ID NO: 14813 - DNA, 596 bp, Gossypium hirsutum
  unsure (1)..(596): unsure at all n locations; Clone ID: LIB3829-017-Q6-K6-B3
gnaaaacccaaaatctctgcaatttccccgccgtgcctgaaaaacgtaaacaaaaaaacaaaaaacccatgtcggctaggttactgaagaaagtcctgaaagaacaagaacaaaagaaacagcacgtaatcgaggaagatgagcaagacgagcttctaaacgacgacgaatcggtgtccccagattccggcgctggttcttctaagaaccctttcgacctcctcaacgaaggtgatgacgccgatgaagataacgccgaccaggtttatgctgatgagacctcaacccgaaaacaagaaccgccaccatcagtgaaaaatgctcttaattcggcttacacatctaataacaaatcgaagaaaaagaaacaaaagaaaggaaaagagggttctttgagtacgggtaaacgtgaaacacccttggatgtgaatttagaagctttagctttggatattgaatcttctagtcaacagtcgggtcttaataaacaacccggatttgaaaactttaagcaatctaaaccatctgtgttgcacgtggatcctaagtatctgaatgtcgagaatgagctgcggagaatatttggttcaaaggtg

SEQ ID NO: 14814 - DNA, 595 bp, Gossypium hirsutum
  Clone ID: LIB3829-017-Q6-K6-B4
attagtgctgccaccttccttagtcgatccacttcatatgcaatacctcccacattcgtttagcagcacatatggtgcttctgttcagcatggtcatttgtcatcaactggtgcttctgggggccaaattgattcttttgtgcagaaagagtcaagtggtgctgcttatattggagatccaaaagttcagcctcctattaatgggaggctaagcattccaaatcctgggaaagttggaagtattggtggtggcttttatggaggtcaccacagcatgggtgttattgcccaataccctacatcaccagttgctagtccgctgatgccatcatcaccggtaggtggaatgactcctctaggtcgcagaaatgaaactaggtttcctccaaaagcaggaccttattctgcatggcaaggacagagagtcagcagctttgaggactccaaaaggcattcctttctcgaagaactgaaatccagcaatgcccgaaaatttgagctctctgatatatttggtcgtatagttgaattcagtgttgatcaacatgggagtcgatttatccagcagaagctggagcattgctgttttgaggac

SEQ ID NO: 14815 - DNA, 610 bp, Gossypium hirsutum
  Clone ID: LIB3829-017-Q6-K6-B5
cggtcgcgtgggttgccatttgccttaatcatcttcctctttctttaaaacttcttcctatttaatttctgactaaacttgcgctgaattccatggctactgccgaggttgtaacagctcaaactgcaatccatgaggagaaacctgaagaagtggtcaaggttgaagaaattgcaacagaagaggtagtggctgttgctcctgcaacagaacctgttgctgaagaaccaaaggaagcagtgcctgaagcagcatccgaagaaccccaggctccagaaactgaagccacagttgaaactgaatcaaaggaggtggttgaagagcccaaggctgtgactgaggagccagaagttgagaaaaaagaagaagagactcctgaggaaacagtagcagagccagttgcggaggagtccaaggagactactgagccaaccgttgaagaaaccaaagaaagcacagagtctacagaagcagcagtagctgcagcagcagaagaagaagtaaagcagaagccgaagccgaagccgccccagtggaagcacccaaagaggaagctgcaaaggaagaaagagaaccagctgaagctcaagctgagaagactactaccgag

SEQ ID NO: 14816 - DNA, 620 bp, Gossypium hirsutum
  Clone ID: LIB3829-017-Q6-K6-B7
ctgcgctcagcgaagagctagcggagatcgacggacaagtcgccgacatttttcgagctttatcaaatggattccagaaactggagaagattaaggacgttaataggcagagtaggcaattggaagagcttactgacaagatgcgagagtgtaagaggctcatcaaagagtttgatagggaagtgaaggaaacagagcgtagaactgatgcaaacacccacaaaatgctaaacgaaaagaagcagtcaatggtcaaggagttgaattcatatgttgcccttaagaagcaacatcaaagcaatcttgagaacaacaaacgagttgatatctttgatgggcctagtgaaggctttggggaagaaaatgtcttgctagcttcatctatgacaaatcaacagctaatagatagaggaaaccatatgatgaatgagactgatcaagccattgacagggctaagaaggtcgttcaagatactgttgatgttggaacagaaactgctgcagctctcaaggctcagactgaacaaatgagcaggatagttaatgagctggattctatccatttctcaatcaagaaagcatctaaactggtcaaagaaattgtaggcatgttgctactg

SEQ ID NO: 14817 - DNA, 596 bp, Gossypium hirsutum
  Clone ID: LIB3829-017-Q6-K6-B8
ctccctttctattactttaagtgtctttgcactttgagcatatgttttaccagaggcttttatctttaagcagttatttggggtggtatagtgagcgacaatatggagcagctgagaaaccagaggacggttcaacaacaacaacaacaagaagaggagcttgaggagatgcaccatggcccgttccctgtggaacaactccaggagttgggcattgcatcccttgacgtaaagaagctcaaggatgcaggtctttgtacggttgaatctattgcttacgccccaaggaaagatcttcttcagatcaaaggaatcagcgaagctaaagttgacaagatcatggaagctgtctccaaactggtcccattgggtttcaccagtgctagccagctccatgctcagaggctggagataattcagataacatctgggtcaagtgaacttgataaaattttggaaggtggaattgagacaggatccattactgaaatatatggtgagttccgttctggaaagactcagctttgtcacactttatgtgtcacatgccaacttccattagatcatagaggtggtgagggaaaagcaatgtacat

SEQ ID NO: 14818 - DNA, 604 bp, Gossypium hirsutum
  unsure (1)..(604): unsure at all n locations; Clone ID: LIB3829-017-Q6-K6-B9
ggnaaaggcgaagctggtgaacgatgacggcgtgggagctgagaagggaatcctggaggtgaaacccagcccccaaaaggtctaaaatcgacactgattgactggttggagcagttgatagttaaggttatgtatgattcttctcagcctcaacattatctatcgggtaacttcggtcctgttcctaccgaaactcctcccacccataatcttcctgtcaaaggccatctccctgaatgtttgaatggtgaatttgtaagggttgggcctaaccccaagtttccccctgttgctgcatatcactggtttgatggagatggaatgattcatggtctgcgcatcaaagatggaaaggcaacatatgtgtctcgttttgtcaagacatcgcgtcttaaacaagaagagtttttcggggggtcaaaatttatgaaggttggagaccttaaaggattatttggattgctcatggtcaatatatataagctgagagaaaaggctaaagtgttagatttatcatacgggaatggaacagctaatacaaatctcatctatcaccatgggaaacttctggcacttcaagaggccgataaaccttatgtgctca

SEQ ID NO: 14819 - DNA, 568 bp, Gossypium hirsutum
  unsure (1)..(568): unsure at all n locations; Clone ID: LIB3829-017-Q6-K6-C10
gtggcatgttatctgggtcaagatggaaacactggctatgatgaaattcgcgctgcaatcaaggaagcaaaggctgtcaaagacaagcccactctgatcaaggtgacaaccaccattggttatgggtctcctaacaaggcaaactcatatagtgtacatgggagtgcactgggtgccaaggaagttgatgctactaggaaaaaccttggatggccatatgagcctttccatgtaccagaagatgttaaagctcactggagttgccatacccctcagggtgctgctcttgaaggtgaatggaatgccaagttcgctgaatatgagcagaagtataaagaggaagctgctgagctcaaggcaatcatcactggtgaactaccagctggttgggagaaggcacttncaacatacactccagagagcccagctgatgctaccagaaatctctctcaacaaaatctcaatgcccttgtgaaagtactccctggccttcttgntggaagtgctgaccttgcttcttncaacatgaccttgctcataatgtatggggatttccataaggcacccc

SEQ ID NO: 14820 - DNA, 580 bp, Gossypium hirsutum
  unsure (1)..(580): unsure at all n locations; Clone ID: LIB3829-017-Q6-K6-C11
gaaatacttgggaaggccggtcttatcccagcagaaacagccctcccttggtttagaaccggtgtgatcccaccagcaggaacatacagctattgggcagacccttacactttgtttgtgttcgagatggcactcatgggatttgcagagcacagaaggttccaagactgggccaaaccaggttcgatggggaaacaatatttcttggggttcgagaagtaccttggagggtctggtgagccggcataccctggaggaccactgtttaacccacttggttttgggaaagatgagaagtcattgaaggatttgaagctgaaagaagtgaagaatgggagattggcaatgttggcaatcttgggttacttcatacaagggctcgtgacaggtgtaggaccataccagaacctgttggatcacttggctgaccctttcaacaacaatgtcttgactaacctcaagttccattagatgaaagtgcctatatttgttccatggaactatccccccggctaaaagctccattgccaaatncctttctgctcctttcttgatctcagtaaaacatgtgtaaatttat

SEQ ID NO: 14821 - DNA, 358 bp, Gossypium hirsutum
  Clone ID: LIB3829-017-Q6-K6-C12
ctcgctcatctgccaaccctaccttaccggccatagcagagatatttgcttgcactgttgggcaaaaaccaagtatggcaaaatattatgttgatgacatagttgaagtcattggactgcttcgagggattccggaagcaacagtacagccaaactgacttagagaaaattagtgatgaaaaaatcgaaacaaaaggaacaatgtttacaaaaggatttatttagggctaatggtatataggaaaccttaccttgtgcagacaatactttttaacagatttcattacttagaaatgctacaccgctggttcatgttcttttattatacctatatccatatcaaaacttcttgtctaag

SEQ ID NO: 14822 - DNA, 600 bp, Gossypium hirsutum
  unsure (1)..(600): unsure at all n locations; Clone ID: LIB3829-017-Q6-K6-C2
taagcagcagaggccgcggctttacacttcccttctctcacctcttccagaagccagaagtcagtttagtagcaatggcgtatgctgcgatgaagcctaccaagccgggtttggaggagccccaagagcagattcacaagatccggatcactctctcctctaagaatgtgaaaaacctagaaaaagtttgtgctgatttggttcgcggggcaaaggataagagactgagggttaagggaccagtaagaatgcccaccaaggttcttcacatcactaccaggaagtctccctgtggtgaaggaacaaacacatgggatcggtttgagctccgtgttcacaagcgagttattgacctattcagctcccctgacgtggtgaagcagatcacatctatcaccattgaacccggtgttgaggtagaagtcaccattgcagattcttaaatgtgccttacttttgctttttggcctcacatggtttttagtttatttgaaagagacttttgattgatgtgaccttctttgcttggatcaatctcaagcttggatgaatgttgtagggtttctatagntggtgtttttcccataatggaaataaaat

SEQ ID NO: 14823 - DNA, 573 bp, Gossypium hirsutum
  Clone ID: LIB3829-017-Q6-K6-C3
gctcttcttgtctgagcaaatgttaacatcagcatccccattagatgatgaatccatctttgaagaaccatttgagggtttccatgcgatgtagccactaatacaggagggattgaagccattgggatggtctgaaccctccctttcatcaaacatttcactggtgtttggatagctcatgcaggccaaagattttctaatatcctcaagtatttcatgggggtttctttgagttgcacggttttgctccaagatcaccttaagtatatcccgaagccagccacactctttgctaagcaatgggctttcagacttcatttcattgttcaacatgctactgtctggctgactgtcaggaacagggactatctccttacatattacctcgaaggaacttccacttgtcccagtttgcataggtccaagggtcccattagcatcatccgaagaaacatgagaatttccagaaaattgatcagcagaaactaaagctaacttttccatttcgacaaagtcatccatcagatttatttctgaagatccaacagttttacgtaatggcgactccctcaa

SEQ ID NO: 14824 - DNA, 573 bp, Gossypium hirsutum
  Clone ID: LIB3829-017-Q6-K6-C4
ctaatttctttggcgcatatataaaaggctatccttttttactttcttcttttggcccagagttggcagaggaatgctcttttgtgctctctgaattgctctctttttgaagaacgcaaacaagggttctgtatatttcaactttagaagatgaggggaagtctttggcaacttgggcaatcaattactcgtcgtctttcacaggctgacaagaaggctgtagcacgtcggtactttgcttcagaggcagatctgaagaaaactgttctttttgatttccatgttgctcatgttgggaagatggtcccattcgcgggatggagcatgcccattcagtacaaggactcaatcatggactcaactgtgaattgcagggagaatggtggactgtttgatgtatcccatatgtgtgggctgagccttaagggaaaggactctgtttcattccttgaaaagctcgtcattgctgatgtagctggccttgcccccggaactggaactctaactgcttttacaaatgagaaagaggggcaatccatgattcagcggttactaaagtgcaagagatcacat

SEQ ID NO: 14825 - DNA, 602 bp, Gossypium hirsutum
  Clone ID: LIB3829-017-Q6-K6-C5
ctccaagccttcaagttccaaccaattactctctctccgctcgctccacttccatgggaacccccgaagccgtagtcaagaaagatgtgtattcggtgtgggcactgccccacgaagacgttactgctagggtcaagaagttgatggaaggtttaagatccgagttcggcgggccacagttcgagccccacgtcacggttgttggggccatcagcttaaccgctgatgatgccttggccaagttctggtccgcttgtgatggccgcaaggcttataatgccactgtcgatcgtgtggctaccgggactttcttttatcagtgcatctttttgttgcttcatcccactcctgaggtggcggaaactagtgctcattgtagtagccattttggttacaagagctcaacaccatacatgccacacttaagcctcctttatgctgacctcacagaagaagagaagaagaaagctcaagaaaaagctaatatgctggatgaaagcatcagtagcctgagcttccagataagtcgccttgcattgtacaaaacagatactgaggacaaaactctcaaatcctgggaaaaggttgcttgatgcaacctt

SEQ ID NO: 14826 - DNA, 587 bp, Gossypium hirsutum
  Clone ID: LIB3829-017-Q6-K6-C6
ggaataggctcatttatgtggttcagttgcggcggccgaagagcgccacgagacagcatacactaaaatccttgaaaagctctttgagatcgatgcctgatgggtcagtcttggcatttgctgacatgatgaggaagaaaatctccatgccagcccacttgatgtatgatggccgtgacgaaaaccttttccaccactactcgtctgttgcacaaagaattggggtttacactgcccgggactatgctgatatagttgaatatctggttgaccgatggaagttgaaggaactcattggactttcacctgagggccgagaagctcaggaatttgtgtgtggacttgcaccgagaattagaaagttagaggagagagctcaattgagggccaaggaatcacccagtgttccattcagatgggtttctggtagagaagtgacgctctaaattggctatcctccaagtgacttgtaatccaagaaagaaacaacagggcttacggagaagcatgatgaaaactgcgactctgtgtttagctggaatgcaataagtggaagaaaagtgtgagtgtgctgcctctttgttatt

SEQ ID NO: 14827 - DNA, 598 bp, Gossypium hirsutum
  unsure (1)..(598): unsure at all n locations; Clone ID: LIB3829-017-Q6-K6-C7
cagatatctgaagtggttaatagtatgaaagacttgattgatacagtagagaaacaaggactggacccatggagagtttggccaagttccctcgaagaacgagcacttcatctggttttcatgcacaatctcaacagcctgaggaacagcatcagcaacagcagcagacaccacaacagcaaatgatgacccagagctctaatggtgatcaaagttctgcccaggcttctgggatgcagcttgctgctaacaatggtgtggctaatgtaaataactcgcttaatgtagcatctgcatcaacatctgctggcaccattgctgggcctctacaccagaattccatgaactccagacagcagaattctatgaataatgcaagcagttcctatggtggaaactctgtgcagatcccgtcccctggttcctctagcacaataccccaaacacaagcaaatgcttctgcatttcaatctccaacaccttgctcatctaataatcctactcaagctccgcatggngccttagcagcttcaagccacatganttcctccaaattctccaacaatgcacatgcctatgcagatgtcaacttttttcc

SEQ ID NO: 14828 - DNA, 621 bp, Gossypium hirsutum
  Clone ID: LIB3829-017-Q6-K6-C8
cgaggatataatcgttctcgaatttcatcacatgccattgaagcatacttgattcagatactgagaactggtttctttcatgctgatccgcatcctggaaatcttgctattgatgtagatgaatcaatcatctattatgattttggcatgatgggggagattaaatctttcactcgtgagagattgctagaacttttctatgcagtgtatgagaaagatgcgaaaaaggttatgaagagcctcatagatcttggagctcttcaacccacaggagatttgtcctcggtgaggagatccgtgctattcttcttggacaatttattggaccagaggccagatcaggacactactttagctgcaataggagaggatttgtttgcaatagctcaggatcaaccattccggttcccatccacatttacctttgttttgagagcattttccacactcgaaggtattggctacatacttgatcctaatttctcctttgcaaagattgctgcaccttatgcacaggagcttttagatattagacaaaggcagcgaacagggagccaactagtgcaagagataaggaaacaagctgatgatgccaggtcctacacaatgtctatgccctac

SEQ ID NO: 14829 - DNA, 596 bp, Gossypium hirsutum
  Clone ID: LIB3829-017-Q6-K6-C9
gccgtttgcatatcgtagctaacctgcaaagtttcgacaatggctgtcgggaagaacaagaggatttccaagggaaagaagggaggaaagaagaaggcggctgatccatttgctaagaaggattggtatgatatcaaggctccatcagtttttactaccagaaatgttgggaagactcttgttacccgtactcagggtaccaagattgcttcagaaggactcaagcaccgtgtgtttgaggtctcactggctgatcttcaaggaggtgatgaggatcatgcttacagaaagattcgtttgagagctgaagatgttcaaggaaaaaatgttttgaccaacttttggggaatgaattttacaactgacaaactgaggtcattggtgcgtaaatggcaaactttgattgaagctcatgtggacgtaaagacaactgacagttacactttgagaatgttctgcatcgggttcactaagagacgaccaaaccaggttaaaaggacttgttatgcacagtccagccagattagacagatacgccaaaaaatgagagagataatgactgctcaggcaacatcctgtgatttgaaggaattggt

SEQ ID NO: 14830 - DNA, 549 bp, Gossypium hirsutum
  Clone ID: LIB3829-017-Q6-K6-D1
gggatcttccacgtacaatgcagacaacagtttttcatttttcgcggacgacggtttcggtacaaatcaggacaacactcaggctcaaatgctaagcttaacatcagctactccagcatgggcacaaggcagtggattcattttcacaccagactatgaaacatcatctataagcttcttgtcttctttcccgagctgcaatgtaaatgaccgaagcatcggagagacaagagaagtgtgtcccaaaaacaggtggttgaaggtacgagctgttatccaatggaaatcaatcagccgcggcgctgcaaaaaggcggcggcagcactggctgcaacacggtatatgtacatgaataatatataagatcaattgcacagcaattaagcatctcctacatgtttaatgcaatcaggagataataatcagtctcctagatgtttcagcatagggttctcaatcttatgtagcgttttttcttcctatggaaatgtaatgtaatgtattgtaggagagggcaagtagtagtattttctcttagggtcatttatg

SEQ ID NO: 14831 - DNA, 508 bp, Gossypium hirsutum
  unsure (1)..(508): unsure at all n locations; Clone ID: LIB3829-017-Q6-K6-D10
gagaggtgtatccaggtgaagtgttggtggtggataaaaaagaggtgttcaatcagtttgcttgatgccccaccctgaaccaaaacaatgcatttttgagcatatatattttgctttgcctaattctgttgtttttggaaggtctgtttatgaatcaaggcatgcttttggggaaatacttgctaccgaagctcccgttgactgtgatgtcgtgattgcagttccggattctggcgtggtggctgcccttggttatgcaggcaaagcaggggtgccattccagcaaggcctgatcaggtctcactatgtaggaagaacttttatcgagccttcgcagaagattagagactttggagtgaagctaaagctttcaccggttcgtggtgtattggaaggtaagaggattgtggtggtggatgactcaattgtgagaggaaccacatcttcaaaaattgntaggttgattaaagaagcaggggctaaggaggttcacatgagaatcgcaagc

SEQ ID NO: 14832 - DNA, 612 bp, Gossypium hirsutum
  Clone ID: LIB3829-017-Q6-K6-D11
gaaaagtagaaatggaattgcttggagcctaaatccggcgttacaccttaagatctgaacctcaacatgtaggattttaacaagtctcttcccagtataatgttctataacttaatgagatcggatctaatagaatggaatggaacgtgaggtgaaaactgctgtcttagccagacacgacttaaaccaacagtgtacaaggttgtagggtaaacattttgacctcttaactgcaactgctgtagccaagacttctatgttatcatccatcaatccatgttaaaactagtccattcgaaccagcaagttttagacgggttcgatctttgttattcgagaagtacaacatgaaactgcgattgttttcaggttatgaggtggagaatgttatgattttctttattgtccttgatcccatttctcccctggtatcacttcaatgctgctttgaatggcttcccaagcatccaagggttaacccttttcttttctgtatatttaagagttggcttttggtgagttgcatcggtcgttaatagctcaagcttattgctgttgaaacgtaactgctgactttttcggtgaatgcaaacatcatcattgcttcttttg

SEQ ID NO: 14833 - DNA, 609 bp, Gossypium hirsutum
  Clone ID: LIB3829-017-Q6-K6-D12
gaaaactgctcgacaagccgtagaatctcgttgaagaagctcaatctgaacgctgatcgaaactttaaatcctctcgtttgatatcttctcttcactcatcaaagttacgcattgagaagacgaaacctcctagtttagtgagcttgtgccttggagttattggtcggcatctggaggaaattatcgaggatttaagtgaaattgctgttaattttcccgcggatattaagataccattggcagcaatagcaaggagaagaaaattactgaatgatgatgtcatcatctccttggccgatagttcttgggaaattcttgacctttctggttcagatgtttccgattttggcttagctaaagtagctgaaatgtgcaaatctcttcgggctgtggatataagccaatgcaaaaaaattactgccaatggtgtttctgaacttgtacggcactgtcattcattggagacgatgagatgcggagggtgcccttcaagcgagtctacagcccggcgatgcttaggcatactgaagccaaagctgaatgatgtggagggagattcttgggaggagcttgataccatggagattggtcatggtgcacagtctttg

SEQ ID NO: 14834 - DNA, 598 bp, Gossypium hirsutum
  Clone ID: LIB3829-017-Q6-K6-D2
cggacgcgtgggcggacgcgtgggggcacaactgagggaggggctggtgagcgatgccattgaatcttttattcgcgccgatgatgctacccagttccttgatgttatccgagcttccgaggatgctgatgtctaccctgatttggtgaggtatcttctgatggttaggcagaaggtcaaagagcccaaggtggatggtgaacttatttatgcctatgcaaagattgatagactcggcgaaattgaagaattcattctcataccaaatgttgctaatcttcaaaatgttggtgaccgcttgttcgatgaagccctatacgaagctgcaaaaataatatttgcgtttatatctaactgggccaaattggctgttacactggtaagacttaaacaattccaaggtgctgttgatgcagcacgaaaagcaaacagtgcaaagacatggaaggaggtttgctttgcttgtgttgatgcagaagaattccgattggcacagatatgtggtcttaacatcatcatacaggtggacgacttggaagaagttagcgaatactatcagaacagaggatgcttcaatgagttgatctctcttatggag

SEQ ID NO: 14835 - DNA, 602 bp, Gossypium hirsutum
  unsure (1)..(602): unsure at all n locations; Clone ID: LIB3829-017-Q6-K6-D3
ttcggngnaattcaagtgactaggatagccacactccttgtgttggtggcattaattttgggtcaaaaggagctgaggccaggaaaggaaggatattggagtcgtttgagtacatagctatgagttgcagagcgcactctgcatcaataactgattttggaggaattggtgatgggaaaacatcaaatactaaagcatttcaagatggagtaaatcatctgagccagtatgcaaatgatggcggggctcagttatatgttcccgctggacaatggctgactgggagctttagcctctccagccatttcactctctatcttcacaaagatgctgttctccttgcttctcaggatatgagcgaatggcctgttttgaaggctttaccgtcgtatggtcgaggaagggatgcagctggtggaaggtttgccagccttatatttggaactaatctcactgatgtcgttgttacaggggccaatggtacaatcgacggtcaaggtgcattctggtggcaaaatttccacaagggcaaattgaaatacacccgaccttacctaatcgaattcatgtactcggacaatatccaaatttccaacctaacc

SEQ ID NO: 14836 - DNA, 609 bp, Gossypium hirsutum
  unsure (1)..(609): unsure at all n locations; Clone ID: LIB3829-017-Q6-K6-D4
tttcaattctataacatggctccagtgcctagtttaccaattaaagttggacatattgatgatgtccaagaactaagaaaagctaaaccagccacnnggttcctgaaagatttatcagagacatggctgataggccaaaagttgttccaaatctatcatcatctcttgacattcccatcattgatctttctaagctcgtgaaaacagacaaagatgaagttatgcagcttaaaactgcctgtgaagaatggggatttttccaggtactgaaccatgggattgatctgaatgttgttgaagacattgaaaacgtagccaaggatttcttcatgttacctttacaggagaaacaaaagtatccaatggctccagggacagttcagggctatggtcaagcttttgtgatctcagagaaccagaagttggattggtgcaatatgtttgctcttggtgttgagccaccttgtataaggaacccaaaactctggccatcaaaaccagttaacttcagagaaactttagaaatttattcaagagaagtgaggaaactttgcaagacacttctgaagtatatagcagtgagccttggactaaaaggggatgtttttg

SEQ ID NO: 14837 - DNA, 568 bp, Gossypium hirsutum
  Clone ID: LIB3829-017-Q6-K6-D5
tccaaagcttcttctgggtctctttttcaacatgagaaaactacaaacaatgcatttgcatcccatagttcacatgtcaacagcttagaaccaaggatcatgcctcgctcgagaaaccatcagcggagattgaaactatgggagctttctccacgctagggttccctgactttcctggagctcgggagcatgctgtacaatgttgggttcctggttataatggcgacctgttgagcctgaatgttgttaatgagaatgtctcggacaagaaccatgatttctactcaaccaaacacaatgaagattttgctggtttggagcagcatattgaagatttgactcaggaaaagttttcattgtaacgagcactcgtggcctcacgtaccattgcggaatctatcgctgctgaaaaatcatccttgactgattgttgctatcaacagagaagtgttgtctaccagctaaaatccgatctggtgaagttgcaggaagaaatcaagcccaactggcagaacttgagtcttttaaaatggaattcacatatgcacgattggtatgtaatgctgct

SEQ ID NO: 14838 - DNA, 602 bp, Gossypium hirsutum
  Clone ID: LIB3829-017-Q6-K6-D6
ctttctctcttaaatctttgaaaaaaaatccatctctctgcaatccccgatctggtgaaatattaaaatggaaacaattctttcttctcactcccttcatccaatcttgaatcccaaagcatccatttccaagaaccttttgttaccttcacagcaaccaagaccagcctctctctttctctcaaaacccattacttgtaccctcaagaaacccacttcccaatcagtaaaaccatctttggcagaacccagaaattggtttgttcatgcacagcaagggctagcagcattagctatctctttggcactcaatttttctccagttctatacactggcaatgcaattgcatcggaatttgatgtgataaatgagggaccaccaaaggaatcttatgtagttgatgatgctaatgtgcttagtcgagtgacaaaatctgatttgaagcgccttttgtctgatttggagtcaaggaagaacttccacatcaattttattactgttagaaagctcactagcaaagctgatgcttttgagtatgctgaccaagttctggagcgttggtatcctacacttgaagagggtagtaataaagggattgttg

SEQ ID NO: 14839 - DNA, 552 bp, Gossypium hirsutum
  Clone ID: LIB3829-017-Q6-K6-D7
ataaatatggcaacgaatgaagtaaagttttgggttcctggccgagtccatatgcgatgaggccaaggattgcccttaacctcaaatccctcacttacgaatacattgaagagaagttatgggaaggcaaaagcgagcttcttctccaatcaaaccctgtttacaagaaaatcccagtcctcattcacggcgataacaagccaatctgcgaatctctcatcatcgtacaatacatcgacgaggcttggtcttccggtccttctattcttccttctgatccctgtgaacgtgctgtcgctcggttttgggctgcatatcttgacgacaagtggttcccagcggtgaaaagtataggagtcgctaaaggagaggaagcaaagaaagcagcaatagcgcaagtggaagcagggttggctttgatggaagaagcatacgacaagtgcagcaaagggaagggttactttggtggggatgaagttgggtaccttgatatagcttttgggagcttcttgggatggcttagagtgacggagaagttcaatgcgatgaagc

SEQ ID NO: 14840 - DNA, 600 bp, Gossypium hirsutum
  Clone ID: LIB3829-017-Q6-K6-D8
ggcttgtgatgatcgaggtgaaaaatgggtgaagcatcgcaagttgacgaatcatgtttttcatggggaaagtttaaagaacatgacaccagcagtaattgcaagtgttgaaacaatgctagagaaatggaaaggcaaagaaggcaaagagattgaagtgtatcaagaatttagattattgacttcagaagtgatatccagaacagcttttggtagcagctactcggaaggggagaagatttttgccatgttgaacaagttatcaataattatgagccgaaatttttttaatactgaaattcctttgatcagcaagttatggaaacctgctgatttgctggagtctgaaagacttgcaaatgaaatacaagattgtgtgatgaagatcgttaagaaaagagaagatagagttgtgaatggagaagctgatagctttggcaatgattttctaggattacttgtaaatgcctatcatgatttggacgacaaaaataggctttcaatggaagacttggtagctgagtgcaaaacattctacgttgccggacaagaaactgttaatggcttgcttgcatggatagtcttacttttagcaatcca

SEQ ID NO: 14841 - DNA, 610 bp, Gossypium hirsutum
  Clone ID: LIB3829-017-Q6-K6-D9
gcgttcgcgcagggttgttggaacgccggctctgacggtggttgaagggtggcgcaggggcttgcaatgacctagccatcttatgattcccactgataaaaaaaaaaagaagaaagttggcgtttttttttttttaccattaataacaatttctttcactgctatatatatatatatatattcctattggtttgacgtattgattatactgtgggccgtgtggggatgtatctgagctggttctgttttgggttgattgatttgaaccggtgggcttagaactggtttccacatttctttattctcgagcttttatctttttgggttggtgattcagttgattatatagagattggctttggtatgcttataaaagatgtcactgaagattatgatgcgagagttgaaggaaatgaaagatgggattgggaacatatcaaagagaggtggagaaagcaagctttggcgaagccggacaagttcccatgtcgttccggaccagccacaggaatctgccgagcaaagcccgtgggcgaatctgcccccggaattgctcttagatattatccacagagtggaagagagtgaaacagcttggcctgctcgagct

SEQ ID NO: 14842 - DNA, 578 bp, Gossypium hirsutum
  unsure (1)..(578): unsure at all n locations; Clone ID: LIB3829-017-Q6-K6-E1
ctgtaaaatgcacgcaaagagtttcttattagtattatttgaaatataagacatgtttatgccaaatattttgttatgtgatatatatggtcatggatctttcaatgggtgattactttagagctttacttatgttttcaaaagatgtatggagtcaatatataggcctagaacccctactatttggcctgagatgatttaaaattgcatttaagtaatagaaacttattcgattcaattatcgggctgtgggtaacctctgcctactgctacctacatttgttccatccctcttgcacctgttctcattatttgtggttaggagtttttgagtttaggattatgttatagataactcaacatagaagacatgagaccatgctcaaaagatgtttgaaccactcgtaatgagctgtaggacatgattctcttaaaagtctctttccccatcccctactcagctctcttatttatctnctgataaggagatcaaggccttgagttgagaatgaagataatctttctgtaataattgtataaaaagttattggttttgcctcacttttatctcaactact

SEQ ID NO: 14843 - DNA, 518 bp, Gossypium hirsutum
  Clone ID: LIB3829-017-Q6-K6-E10
ctcgcattcctatctccctagatagtccatagtgcgcagcagaagatcctacactgggatatcgagctcttcgagaagacccagggcacttccggaaaagatgatccatattctcttctcctaaaccacaccgggggcacacagttgtattcgacagcttcttaattaccatatttgctcgtgttgctaaaaaattccacgagcttttctatactgtaattttaatcttatatgggatatccagtagccaaagctttttgtaaaagctcttgtagtcctcctgtatcgcataagcgctaggattatctgcattaccttgtaatagtttataggcactacgcactgtgtaatcgcccgacgcctcagcacgccatacttggaaatcttcatgaggtgtctctgacaacgggatactcagaatcttctcggcaacatcctccagaaaggtagatttgattacctcctccttccatattctgttactaggatcaataaaatccgtaactctagcatcggtt

SEQ ID NO: 14844 - DNA, 450 bp, Gossypium hirsutum
  Clone ID: LIB3829-017-Q6-K6-E11
gttctagatcgcgagcggcccccttgtttttttttttttttttttttttttttttttttttttttttttttttttttttttttttttttttttttttttttttttttttttttttttttttttttttttttttttttccgggggaaaaacccccgggttccttccccaaaggggcccccgggccccaccccccccccaaaaaaaccccccccccccgttttttggttttttcggggaaacccccctcttttttaaaccgcccccccccctttaaccccaagccttccaaagtttgcgccccaacccccccttttccaaaaatttaaggggggggggggcccccccccccccccccccaaaattcgccccccccctccccccccggggtttttaaaaggaaaccccctccccccccggggggggggtgggccaccccccccccgggccccc

SEQ ID NO: 14845 - DNA, 593 bp, Gossypium hirsutum
  Clone ID: LIB3829-017-Q6-K6-E12
acgggtttcacttgcatagctagcaaggctaaagagtttgcaagatggggagcatggatagcttttggcagctgggggattatcttcgaggacaatcaaaagcctcagaggataaccaatggctgatggttgcctctaaactggctgagcagacgaggaaaagggtgaacgcctgagcaatcttgatctttcgaagggtccagccgaaataaggacaagggataaatttggtttccgggaagacaacaaattcgagaaccttaacttcaatatgttaaacttggactccaagattggagataatgcaagcaaaagctcattccgaaatggtacctacaatataaatgctgtttaccagaaaaataatatcaatagcctggaagacctggctggcaacaaatatagcggcaataatcatagcaacaaagatgtcaataataacagcagtaccagcaataacaacagcaatgagaacagtgcaaacaatgctgttgacaaacggttcaagacattgcctgcagctgaggcactcccgagaaatgaggtgcttggaggatacatttttgtttgtaacaatgatacaatgcaggaag

SEQ ID NO: 14846 - DNA, 431 bp, Gossypium hirsutum
  Clone ID: LIB3829-017-Q6-K6-E2
tctcaatgtacaggaaaggacaacagaggacctgaactgctatcaccataatacacactctattcaaaaatgtcatgtgcgttgatggactgtgtagggtgtgagaaatgggcactttggggaaagctgcaagatcttgggctcggaactgccttgaatatacttttctctgttaatggcgaagaccactcgcctcacacattgaacatgcaacggctcgaacatgattgccctgattaatctactcaatctactatgctccatctataaaatttgtccatgaaatgggagcagctcttgtaaaactcaatgtaggaacagcaacttatactacgtttaacagactggttcaacatgtatgggcgtcgattgttaagacataggtcctgatccaactccgaagaactatattgctcttccgaaagctacat

SEQ ID NO: 14847 - DNA, 556 bp, Gossypium hirsutum
  unsure (1)..(556): unsure at all n locations; Clone ID: LIB3829-017-Q6-K6-E3
cgagcaagcacagtttcccatggaagaacaatgcagctgcagtgacaaatgtggttgcagttcaaaaacgcagagcaacgcgtcgagaattagaagcagggtcgcagaagcattggaagatataactgcacttttctatgacgaagaacgcaacgagatatatacgggtaataggtacggtctagttcatgtgtggtctaactaagggtttgattttggttaggatgttatgtaatattagttgagtggtttgtgaattggggcattgtgattcgcatggaactgtaccattattaactattatttgtatcgaaaattcatttagtttctgctctaaatgatattcttattaggctttattcaaaaaaaaaaaaaaaaaaaaaaaaaaaaaaaaaaaaaaaaaaaaaaaaaaaaaaaaaaaaaaaaaaaaaaaaaaaaaaaaaaaaaaaaaaaaaaaaaaaaaaaaaaaaaaaaaaaaaaaaaaaaaaannnnagggggggcccctttaaaaagaaccaaattttactccccggggttggaaaaaaataatttttt

SEQ ID NO: 14848 - DNA, 532 bp, Gossypium hirsutum
  unsure (1)..(532): unsure at all n locations; Clone ID: LIB3829-017-Q6-K6-E4
ttcgcaatcggcgacaaagcgagtgacctccgcattagtcaactcgtcccaattcaactcagcctgcgactcagtctacagtcaatgcctctcccttacccaagaagcctaccccggagtcttcccttatcagctcttgaacgccgccgctaacctccatcaacacctcacttcccttcgccctcaccctctcatcctccgttgggttcctcatcctcccgctcgctcccaagtcgattctgcgttccggttcgtaactcgccaccaggataatccccggagcgatgaagaagcacttctcctggattcctccgacttcagggaatgggcagtggttttattcagcgatgccgtcgtgggaaacgctggaaaggcagttttgcagcgagtgccgcttggggttttgggtattgcggngattggcgcggcggcgaggagggggaaagaggttgttggggcagcgattggagtgtacgcgcttggtatggctacttcaatttaccttagcttgtctgggttagttcttaattgg

SEQ ID NO: 14849 - DNA, 615 bp, Gossypium hirsutum
  Clone ID: LIB3829-017-Q6-K6-E5
aaatagttgcttcacaatggcctctacaaccatggctctttcttccccatcattcgccggtaaggcagtgaagttctccccttccacccctgaaatccggggaactggccgtgtttccatgaggaaaaccaccaagcctgttccttctggtagcccatggtacggtcctgaccgagttttgtacttgggtccactttccggtgagccaccatcttacttgaccggtgagttccctggtgactatggttgggacactgctggactctcagctgatcccgagacctttgctaggaaccgtgagctcgaagtcattcactgcagatgggccatgttgggagctcttgggtgtgttttccctgagctgttggctaggaacggtgtcaagttcggtgaagctgtatggttcaaggccgggtctcaaatcttcagtgagggtggacttgactacttgggtaacccaagcttgatccatgctcaaagcattttggccatctgggcttgccaagttatcttgatgggagccgtcgagggttaccgtatttgccgtggaccactcggtgaagtgactgacccattgtacccaggtggtagctttgacccattgggtcttgctga

SEQ ID NO: 14850 - DNA, 589 bp, Gossypium hirsutum
  unsure (1)..(589): unsure at all n locations; Clone ID: LIB3829-017-Q6-K6-E6
gnaaatctccaagnagttgcaaggcaagccagactgacatcggaaactacagtgatggcaatatcgtcgcctccttgctcgcacataaattgggtgtcacacagtgcaccatcgcccatgctttggagaagacaaaatatcctgattcagatatctactggaagaagcttgaagacaaataccatttctcttgccaatttacagctgatctttttgcaatgaaccatacagatttcatcatcaccagtactttccaggaaattgcaggaagcaaggacactgttggtcaatacgagagccacactgctttcactcttcctggtctctaccgtgttgtacatggtatcgatgtgtttgatcccaaattcaacattgtttcccctggtgctgatatggagatatacttcccttacaccgaagagaagcggaggttgaagcatttccatactgagatcgaagaccttctttacagcaaagttgagaatgaagaacacttatgtgtgctcaatgaccgcaacaagccaattctgttcacaatggcaaggcttgatcgtgtcaagaacttaaccggactcgtcgagtggtacgg

SEQ ID NO: 14851 - DNA, 424 bp, Gossypium hirsutum
  unsure (1)..(424): unsure at all n locations; Clone ID: LIB3829-017-Q6-K6-E7
ctgggacataaacccanaattcgtcctcccttcactgacattgtgaagatgcttgagattgctgaaacggatatactgacaaccgtgcgtaaagcccggttcaggtgttgcatgactcaaccaatgacaattgactgatccagaatggaagagtggagaacagacgacaataaacggaaagatgcaagggaagcagtaagaaattaaatataattcatgtatgtatcagtattttacatttatttatttttcaccctttacgtaatattttccagatagaaggtaactactgggttcagaatgctggattttggtgtgaacttgtacttggactagtggtgatggtagttgtagaagtaaggggaccattgatgtggtttccttatgtatctatatttatatatgtgggactgccatatctctt

SEQ ID NO: 14852 - DNA, 607 bp, Gossypium hirsutum
  Clone ID: LIB3829-017-Q6-K6-E8
gggatttctcctccttgcttttaatcagatctcaaacaattgtggtatgcttcattatacgtctggtggccagtttaccataccaatagttattcgtggacctggtggtgttggacggcaacttggtgcagagcattctcaacgccttgagtcctattttcagtcaatacctggaattcaaatggttgcatgttcaaccccttacaatgccaagggattaatgaaggctgctatcagaagtgagaaccctgttatactttttgagcatgttttgctttacaacctcaaggagagaatcccagatgaggattatatctgtaatcttgaggaagctgagatggtaaggcctggagaacatgtcactattctaacctattcaaggatgaggtatcatgtgatgcaggcagcaaaaactttggtgaacaagggttatgatcctgaagtaattgatattaggtcattgaaaccatttgatctttacaccattggtaactcagttaagaagacacatcgtgttcttattgtggaggagtgcatgcggacaggtggtattggtgctagcttgaccgctgccatcactgagaatttccatgattatttggatgct

SEQ ID NO: 14853 - DNA, 596 bp, Gossypium hirsutum
  unsure (1)..(596): unsure at all n locations; Clone ID: LIB3829-017-Q6-K6-E9
gcgttcgcngaagttcctctccgttctctcccataaaaccaaaccctaactcgaattcagagccaccaaactcaccttaacaatggctcatcatggcggctccgacccagaatccgaaccaaacacccgactttacaatccataccaagaccttaacctccaggttcccatcaacaacctttacaagctccctacctccccggagttcctcttcgctgaggaatccctccaccagcgccgttcctggggcgaaaacctaacgttttataccggttccgcttatttaggcggctctgtatcgggcgcagccgtcgggttcttctccgctctcaggaatttcgagcaaggcgatactttgaaactcaaaattaatcggatcttgaatagttcgggtcacacgggtcgatcatgggggaacaggatcggtgtggtgggcttgatttatgcggggatggagagcggggtcgtggctgtaactgaccgtgatgatgtctggagtagcgtggcggcgggtcttgcgaccggagctctttgtcgggccgcgagaggggtaaggtctgctgcagttgctggtgcgcttggtgggttggcagctg

SEQ ID NO: 14854 - DNA, 569 bp, Gossypium hirsutum
  unsure (1)..(569): unsure at all n locations; Clone ID: LIB3829-017-Q6-K6-F1
cttggcgggcatctgcatttgggtttaggttacttgaatttaccagaaatggcttcttgggacactccaagaaattcaaacccgaagatatggaaatacgaatagaggggaagaactgcgtggtcacaggagcaaatgctggcattggttttgctactgctgaggctcttgcatcatgtggagcaactgtctatatggtgtgtcgtaacaaggagaagggagaaaccgctctttctaaaattcagtcttcaactggcaatccaaatgttcatttggaagtttgtgatctttcgtccatcagcgagatcaagtcatttgcatccaggttctcttcaaaggatgttccggttcatgttcttgtcaacaatgctggactgatggagcagaaacgagttacgacatctgaaggatttgagttgaactttgctgtcaatgtattgggcacttatgccacaacagaattaatgttgcctttgctggagatagctattcctgatgctcgagtcataacagtttcatctggtggaatgtatactacttncttgaccagtgatctacagtttagtgat

SEQ ID NO: 14855 - DNA, 568 bp, Gossypium hirsutum
  Clone ID: LIB3829-017-Q6-K6-F10
cggacgcgtgggtttcccaccaggattgcccgcaattgtgttttgatttagtatttgagcaaggctttgagctctctcacaactggaaaaatgggagcgtctatttccttggttacagaacttttgtcccagaggaaggctctgatgatgaatttgatagtgaggaagaaagtagcgaggatgaggaacttcctgtggctgctgaaaacggaaaagctaagacagatgcaaaaacggctaatgctgggaaacctgatgctgtaaaacaagctgtcaagataactgaaccaagtgataacaagaaaaatgaggacgatgatgatgatagtgattccgaggatggaagtggttctgatgatgaagatgaagagatgtctgtggatgaaagttcagatgatgaggatgaggagacacctaagaaggttgagtcgagcaaaaagagaccggcagaagctgcaacacctgtttctgcaaagaatgctaaacctgcagcgacacctcagaaaacagatggttagaagggtggtcacactgcaaccccacacccatcaaagcaagctgggaaaac

SEQ ID NO: 14856 - DNA, 620 bp, Gossypium hirsutum
  unsure (1)..(620): unsure at all n locations; Clone ID: LIB3829-017-Q6-K6-F11
agtttgtggcacaacaccttgtatgatacgtggattcacgtagaaattgaagaagccctattgaaccacttgggggttaagcggaatgaggtaacaagcgatggtttgttctcagttggagaaatggaatgtatgggatgttgtgtaaatgctcctatgatcacagttgctgattactccaatggatctgaaggatacacatataattactatgaagatattaccccaaaaagagttattgagatagttgagatgctaagaaggggagagaagctaccgcctggcactcaaaatccaaaacgaatcaagagcggaccagaatgtgatcactttggagtttcagagacaaaaggcaaaggagctgcaagaatactttaagcagaagaagcttgaggaatctagtcaagggcctttctttgggttccttgcgaagaatgagattgctaatggaagatgggcaatgtttggttttgctgttgggatgttaaccgagtatgcaacaggctcggattttgtcgatcaagtaaagatcatgctcttcgatttncggataatagatttggaatgactctntttcttgtataccacaatgctgctgctattcatactttatgatttct

SEQ ID NO: 14857 - DNA, 610 bp, Gossypium hirsutum
  Clone ID: LIB3829-017-Q6-K6-F12
gcgttcgcaaaatcctcctcattacttcaggcaattagcacatacacttcaaggcttaaaactttgatttctagagaaatagaggaagtcgacgttagagctgacgctgaagccttaaggtacaaatatgagaacaacagagttatggatgtttcctctccggatgtgagctcacccttaaatcaactttatggtaatgagaagataggaatggatgtactttctagaggaatgcaaaatcaacttcttgaaagacagaaagctcatgttcaacaatttttagctactgaagatgctctcaacaaagctgcagaagcgagggacttgtgtcaaaagcttataaaacgtctacaaggaggtagtgatttagttccttcacgttctcttgtcggaggtgcaacacagaaggttggcagtcttagacaatttgagttggaggtttgggccaaggagagagaagctgctgggctaaaggcaagcttaaatacactaatgtctgaaatacaacggttgaacaaattgtgtgcagagaggaaagaggctgaagattcattaagaaagaagtggaagaagattgaagagtttgactcccgtagatccgaacttgaat

SEQ ID NO: 14858 - DNA, 604 bp, Gossypium hirsutum
  Clone ID: LIB3829-017-Q6-K6-F2
tcgcactgtagttcatagaactccaaaatcggggagacagtcattgttttaccaagatttggcctcaccgatctctgcccggagagggaaattctctagtcctggtcaagcggctgctgtctcagctttatggcaggagaattttggaggttcagatcttccacctcctccaatgtacaccttggaggaccgttcagatttttctcctgaatctggtatactggattatcctatgtctcccgaaatcaagtcagacccaaaaagcccggttcaaagttctggacgtgacttctcaactccagcaaagagcaagtcaggggctagcacttcatttgctatacttaatgggcagcagaatcagcagagctcagcaagtttgagttggtggtcacccgcaaagaatagtagtatgagcaggatgacaagggaaagggttctcccgttgagggtgttgttcaacctggtgctctaatcacacttccgcctccaagggaagttgctaggcctgagatacaaagaaattctgtacctgcaggcaatctggacgaggaagaatgggttacagtttatggattttctcctgctgatacaaatttagttttgc

SEQ ID NO: 14859 - DNA, 588 bp, Gossypium hirsutum
  Clone ID: LIB3829-017-Q6-K6-F3
gagaaagttgcagcaaaacagacttgaggttatccgcaagaacttggtaaagaagtgcattgagctcttctttgaaatagcagagaacaaggaagattacaacaagttttatgaggcattctcaaagaacctcaagcttggtatccatgaggactctcagaacaggactaaaattgccgaattgctccgctaccactccaccaagagtggtgatgagatgaccagcttgaaggactatgtgaccagaatgaaggagggtcagaatgatatctactacatcactggtgagagtaaaaaggctgttgagaactctcccttccttgagaagctgaagaagaagggttatgaggtcctttacatggttgatgctattgatgagtatgctgttggacagctcaaggaatttgagggcaaaaagcttgtgtcagctaccaaggaaggtcttaaacttgatgagagtgaggatgagaagaaaaagaaggaagctttgaaggaaaagtttgagggtctttgcaaggtcatcaaggatgtgctgggtgacaaggttgaaaaggttgtggtttctgatcgtgtggttgactcaccttg

SEQ ID NO: 14860 - DNA, 581 bp, Gossypium hirsutum
  Clone ID: LIB3829-017-Q6-K6-F4
tgcccgtccatttgtaacccatcacaatgaattaaatatgaagctctatatgcgtattgcacccgagttatatcttaaggagttagtagttggtggactggatcgtgtgtatgagattggaaaacagtttagaaatgagggcattgatttgactcacaatcctgaattcactacctgtgagttctatatggcttttgctgactataatgacttgatggagcttactgaaaaaatgttgagtgggatggtcaaggaacttacaggcagctataaaattaaataccatgcaaatggccttgacagtgctccaattgagattgatttcactccacctttcaggaggcttgacatggtagaggagttggagaagatggctaacctcaacatacccaagcccttttccagtgatgaaactaacaagtatttggcagatgcatgtgaaaagctcgagattaaatgccctcctcctcaaactacagcacgtttgttggataaacttgttgggaatgttctagaaagacgtgtgtgaatcctactttcatcatcaaccatcctgaaataatgagttctttggcaaaatg

SEQ ID NO: 14861 - DNA, 596 bp, Gossypium hirsutum
  unsure (1)..(596): unsure at all n locations; Clone ID: LIB3829-017-Q6-K6-F5
gcgttcgctttcctcttctgttcnctggaacattgcccttcaagcaacaccatcaaagcttgcaagtttcaataatggacgaatctggggagtacccaaaggagtactacaccagcaacggcaaccccaggagactgacttcaacatcctcatcttcttcatcaacgacgagcgttcacgttaccggcttggatggcctcgtcaacgtcaattccctcttcaccatcgctgtctttgtgggcctctctttggccactccgggccaacacagtctcgagaaccgagccccctgcgacgccggcattgacgtagctaaaaagctcttggtcttcgaggtcgtctccttcagcttcttccttttctcctccctggtggctcagggtctaaagctcgccatcaatttgttgaacagcaaagatgtggatgaagctttcagggcacacattaaccttaaagtattgaggtttgggatgatgggctccgccgtcgggtccgtcatggggtgcttgtttctgatgctttcgatggtgaacgtgatcgagatccggcttgggttgttgtcttgcggcagccagtcctccattcatgccacggcg

SEQ ID NO: 14862 - DNA, 597 bp, Gossypium hirsutum
  Clone ID: LIB3829-017-Q6-K6-F6
caagattgcatggccttttgtacagaatggaagatgttatctctatgagtttaacagctgttacttcactccttgcaaagtataagattgaccccaaacaaattggccgtcttgaagttggtagtgagactgtgatcgacaagagcaagtccattaagaccttcttgatgcaaatctttgagaaatctggaaacactgacatcgaaggggttgactcaactaatgcatgctatggagggactgcagctttatttaactgtgtcaattgggttgaaagtagttcatgggatggacgatatggtcttgttgtctgtactgacagtgcggtctatgcagaaggacctgcccggcctactggaggagcagcagcaattgctatgctaatagggcctgatgctccaattgcttttgaaagcaaattacgtggaagtcatatgtcccatgcctacgacttttacaagcctaaccttgctagtgaatatccggttgtcgatgggaaactttctcaaacatgctatctcatggctctcgatacttgctacaaatatttctgtcacaagtatgagaaactagagggcaaacagttctctctttcta

SEQ ID NO: 14863 - DNA, 517 bp, Gossypium hirsutum
  unsure (1)..(517): unsure at all n locations; Clone ID: LIB3829-017-Q6-K6-F7
cggnacgcgtgggcaagacgcgtggtgcggtcgcgtgagngaaaaattaaaatcctttgaaagaggagaagagaggagctcctccagctcacgcctacggccactgggcctgcacgcgcacacacgccgacgtacacggccgttggaaggctaaaagccttcatttttcttggctaatcgaatgtaatgccttcttccttttaaacatcaacaattttttttgcacaaacgattcgtatacacgttgaacaatacataacattagtataaaattaaatcacctttttttaaaaaaaactgcttgtatatctttgaatatatctgagtatatattgtttctttttatctaaaaaaaaggggcccttatacacattagtgaataggctcttatagactttagtgaatcgttacatttacaaagaaatctttgatttcttttgcatgtttatttctcttttctgctgcagctctgttttttttgcaggcgccatacaggaatccggtcatgactatttac

SEQ ID NO: 14864 - DNA, 611 bp, Gossypium hirsutum
  Clone ID: LIB3829-017-Q6-K6-F8
gcgttcgtgcagcttcaccgtattattatttgcacaatgtgctccctattttgatcaagcattctgtagttgaactagttgtttctgatggtggatgcttgcaggcaattcttccatcggatcttgaagagtatcaaagtcttagatgtagggttgcttttcatgccctgaggttccgacaagatgttcaggacctggcaactaatatattgcatagattaagggctcctggaagaccatttattgcttttgatcccggtatgacaagagatgctttagcctatcacggttgttctgaactcttccaggatgtgcatgctgagctcattcagcacagaagagcttggatgagaaaacgtgggataataaaggggcagctttctgtaaattctgctaagcaacgtctcaagggttcatgcccattgacgccagaagaggttggtattcttcttcgggcatatggatactcatgggatacaattatatatgtgtctggaggtgaagtttttggaggccagaggacattgatcccacttcacggattgtttgaaaatgttgttgataggacttccctcagcacaagctgggagctgagtagaatttatggtcgt

SEQ ID NO: 14865 - DNA, 228 bp, Gossypium hirsutum
  Clone ID: LIB3829-017-Q6-K6-F9
ttcgtaaaaaaaaaaaaaaaaaaaaaaaaagggggggaaaaaaaaaaaaaaaaaaaaaaaaaaaaaaaaaaaaaaaaaaaaaaaaaaaaaaaaaaaaaaaaaaaaaaaaaaaaaaggggcgggccgcttttaagggatccaagtttccggtccccttttcttgctttttttttggcctcttttatatagtttcttcttggggggggggggcctggcccgccgattcac

SEQ ID NO: 14866 - DNA, 586 bp, Gossypium hirsutum
  Clone ID: LIB3829-017-Q6-K6-G1
gcgggatgctgctcaatcagaaaaataaaagccatggatgcgatatctggaggtaagctggatgaagctataaattatctaacagaagctatcatgttaaatcccacctcagcaatactatatgcaactagagctagtgtatttgttaaattgagccaaccaaatgctgcaatccgtgatgctgatgcagctttaaagatcaatcctgactcagcaaaaggatataaagttcgagggatggcaagggccatgcttggccaatgggaagaagcagcaagtgatctgcatgtagcgtctaagttagattatgatgaggagattggttccgtactcaaaaaggtggaacctaatgcacacaaaattgaagagcatcgcaggaaatatgaacgcctgcggaaagaaagggaactaaaaaggagtgaacgtcagaggcaacagaagaaagctgaggcacaagatcaggaagcattatctgcttttaaagatggccaggttattggcgttcattccaccagtgagctggaaattaagttaaatgctgctacaagaacatcacggctggcgatattgtacttcaccgcaacat

SEQ ID NO: 14867 - DNA, 221 bp, Gossypium hirsutum
  unsure (1)..(221): unsure at all n locations; Clone ID: LIB3829-017-Q6-K6-G11
aaagaannnncagaaaaaggggggggggggggaaaaaaaaaaaaaaaaaaaaaaaaaaaaaaaaaaaaaaaaaaaaaaaaaaaaaaaaaaaaaaaaaaaaaaaaaaaaaaaaaaaaaaaaaaaagaagaaaagaaaaaaaaaaaaaaaaaaaaaacaaaaaaaaaaaaaaaaaaaagggggggcncgaaaaaagaaacccaaaanaaaaacaccggggggc

SEQ ID NO: 14868 - DNA, 598 bp, Gossypium hirsutum
  unsure (1)..(598): unsure at all n locations; Clone ID: LIB3829-017-Q6-K6-G12
atcgtatccgggnaaagcctgtgactgtaatctgctcacttgcagaatctgggaattgtgagagctggcttgtttcggaaggtgttttgcctcctctcataaggcttgttgaatctggcagcacagttggtaaagagaaggcaataatttcactgcagaggttatcgatgaccacagaaacagccagagcaattgtagggcatggcggatgttcgaccactaattgaaatctgccggactggaggctcggtgtcacaggctgcagctgctagtacattaaaaaacatatcagctgttcccgagcttcggcaagtgctagcagaggaaggaatcataaaagtgatgatcaatctccttgattgtggaattttgttgggttcaaaagagtatgctgcagaatgcttgcagaacctcactgccagcaatgagaatctgagaaggtctgttgtttcagaaggtggaattcgaagcctattggtataccttgatggtcctttaccccaagaatcagcagttcgagctttgaggaacttggttggctcggtatcgatggaagttcttgtatcacttggcttcgtccctcgattagttcatgtgc

SEQ ID NO: 14869 - DNA, 590 bp, Gossypium hirsutum
  unsure (1)..(590): unsure at all n locations; Clone ID: LIB3829-017-Q6-K6-G2
gggcgctctctcaattctccgccgaccaacagcctttcaaggtctgttcctctgcccatccttttgactcatgtgagagtcaatcaaggcctccttgagtcgaagggctcatgagcttcgtttgtagccccgaatcgccacttagcttcaatcatggtgaaacaagcgtggattcaagggcctcaaatgcaggtgagcgtcgttttccatttttatttacattcaatcaagaaaggggcagatgggaagataagagagaaataagggacgaagattgcgagtaaatcaccttctttttcgttttctattgcttctgtttgcgtaaatgcgcgtaacccgttacaagcaattctcttcaggctttatagccgagagacaaaagagaaaagaaaagaaaaaaaagaaaatgaaaaatcatttctttgttttcttgcacgtatttgctgttgtggtttgtccttttttttggcaggtacaggtgtgcgctggcgtacggngcgtgctggctgctgagacgctggtatcgtacggagggcgggcgtggcacgacgtggttgctgttcgtgaaggctgcggtgcgaggacccctt

SEQ ID NO: 14870 - DNA, 588 bp, Gossypium hirsutum
  unsure (1)..(588): unsure at all n locations; Clone ID: LIB3829-017-Q6-K6-G3
tcgcagnaaaggttggtgtttttgtaaggcgtggtaaaggcgggccacttactgtggttgaatacagtgaattagattcatcactggcttctgcagttaaccagcaaactggacgccttcgtttttgctggagtaatgtgtgcttacacatgtttactttggatttcctaagccaagtggcagatggccttgagaaagacggcatttaccatctggcggagaaaaaggttccttctatccatgggtatacaatgggtttgaaactagagcagttcgtctttgatgcatttccatatgctccttcaactgctttgtttgaggtattacgagaggaagagtttgcaccagtgaaaaatgctaacggttcaaattatgacactccagacagtgcaaggttgcttgttctgcggctacacacacgatgggtagtagctgctggtggcttcttaacacattcagtgccattatatgcaactggtgtggaggtatcaccgctttgttcgtacactggagaaaacttggagtccatatgccgtggaagaacatttcatgcaccctgtgaaattgcattntagttcaactttgtga

SEQ ID NO: 14871 - DNA, 366 bp, Gossypium hirsutum
  Clone ID: LIB3829-017-Q6-K6-G4
ctttactcctacaaggtcacgaggatggggtgacttgctccgatctgcacacgctcgacaaaccaggtacatcaagcactatgggggacagattgcttgttggtttcgagcatgcgtaatcagtacagttgtgccaagacaactcacttttgcggggctgtagcgaatggaaggcttcttgttgatggatcggaggacatgaataaaccgatagaaacgatgatatggctaacatgcacttcagccatgagtgtatatactgtattattcaacatgttcgtatgtatggtacaaccactgaaactatatactgatggcatgccatgctggaaatcaaacagcacagatgtaccaactatcccattg

SEQ ID NO: 14872 - DNA, 594 bp, Gossypium hirsutum
  unsure (1)..(594): unsure at all n locations; Clone ID: LIB3829-017-Q6-K6-G5
tcggnaatcagaagcctcaattctactgggaattgagaatacaaagttgnctgaaaaatcttatcgagtttcaaaaagtggagtatgactttcagtactataaagtggaaatggcaacggatgtccagttacttatcttctcggaggggaaatctaatattgttcctgctgatgttattgtaccttttcaaccttcttgtcttgaatccactgaaattccagttgctgaggcactagaagcttggagatggtacttggctactgttagatcgttaccacattccattggatcagaaatacagaaggtggtagaagatgatttggttgcagcaagacaaacggataggagcttgggaagtcgagattttagcagatggttgacaatggctcggctcatttcgtcaagttttggagaaaccagtttgtcaaaggaacattgggaaatggtaaaagaaatggagaggctaaggagggagagactgaagtagaatccaaaagtccacaagattttgaagctttggtatttggtaaatgattgttgccccaaagggtgaagaaaaaagcaaaaaaaccaaaatagcaaacatggggatt

SEQ ID NO: 14873 - DNA, 603 bp, Gossypium hirsutum
  Clone ID: LIB3829-017-Q6-K6-G6
gcgttcgcaaaacgaagggacaagagagaaacgacaagtgaagaccagaaacagagaaggtggctcgtgttttaataaacgaaggcagaaaggaatcacttaaagaggttcaagaagaaagtgaaaactttagcagtccaatcgaagtagctgaagaaataccgataggaaagctaaataaggtcactcgaaaaccgaggggaaaaaagagaaaacgacaagagattaccaataaaccggtaaaggtactcaaggacgatattgcttggcccatgatggaaaacgagaagaaatatgtcaaggagcaacaacagcaaatgaagggcggaaatggagtaacaaaatctgttggtgaacaagatcaaccacaacgaggtaagatggttagtgaacaaggctcacaggacccaaaaattgacatcagaaccaaaacgctggtaaatccttttgatggagatgtaaaaaacttgaagatttcacctccaaagcgttccgctcgtctattagaaaagaaaaagaaagaaggtttaaagcacgaggaacagcagcaaaggaagcttcgtgaaagagaaagcgttcgcttattgtttgtgctttgccagc

SEQ ID NO: 14874 - DNA, 596 bp, Gossypium hirsutum
  unsure (1)..(596): unsure at all n locations; Clone ID: LIB3829-017-Q6-K6-G7
cggncgcgtgggcggacgcgtgggttacggtcatgtggatccgaaaatggaaaccccggaccaggaccagaacagttctggaactgatggagtggtccctgtccaaagcaacaccgtccaagctccgatgatcaacgatcactgtttcgacatggagttcactacaccaaaagccttcccttatggctacaactacaactgtaactacaaccctcactgtcttagtcacagtgtatcatcttcttctctggatgttggggtagttccagatggcggtagtacgattacggatgtatcagtcccgtgcgcgaaagtgacggagacgacttatcagactgtgcaactctcgttggcggagagagaagcgagggtgctgaggtacagagagaagagaaagaacagaaaattcgagaaaacgatacgttacgcttctaggaaagcttacgcggaggtgcggccgaggattaaaggaagatttgcaaagcgcagtgacgttgaagtcgaagtcgacggcggttacatgtatggatttggcgtcggtccgtcgttttgaaattaactaaggtagccatgtagtaatattctacgttaaattt

SEQ ID NO: 14875 - DNA, 77 bp, Gossypium hirsutum
  unsure (1)..(77): unsure at all n locations; Clone ID: LIB3829-017-Q6-K6-G8
canaatagcttttcaacatctgaggaatgtgattttgctgagtagcaaagatttaataaaagttgagatacttggtt

SEQ ID NO: 14876 - DNA, 256 bp, Gossypium hirsutum
  unsure (1)..(256): unsure at all n locations; Clone ID: LIB3829-017-Q6-K6-G9
gcgttcgcccagcgtccggcggnttattactctgctgatgatcttgtactggaacgaagaactgcttcaggaaattaagtttatagtgccaagttataccggtaagagcctttatctggttgttgtgagccaattgcagctcaattattagttgtgtgctaatatgccccttgcctatattttaaactgtaaaaaccaaaaacatgtattcgagtaatcgaatattcagaatgcataacaacgacttcttagcttc

SEQ ID NO: 14877 - DNA, 175 bp, Gossypium hirsutum
  unsure (1)..(175): unsure at all n locations; Clone ID: LIB3829-017-Q6-K6-H1
cagnactctaaccggcaagacgatcagcgctgctgggtcgagagctccgacacgatcgacaacgtgaagaccaaaatccaagataaggaaggcatccctccagaccagcagcgtctgatcttcgccggaaaacagcttgaggacggccggaccttggccgattacaacatccaaa

SEQ ID NO: 14878 - DNA, 616 bp, Gossypium hirsutum
  Clone ID: LIB3829-017-Q6-K6-H10
cggacgcgtgggcggacgcgtgggcggacgcgtggggcagcttagtccaactccacacccaccaccattggctgtttgtaatcatccgaaaaagaatggtgaccgtggaagaagttcgtaaggctcaacgtgcccaaggccctgccaccgtgttggccatcggcacatcaaccccgcctaattgtgttgatcagagcacataccctgactactatttccgtatcacaaatagtgagcacaaaaccgagttgaaagagaagttcaagcgcatgtgtgaaaaatcgatgatcaagaagcgatacatgtaccttacagaagagattttgaaagagaatcccaatgtatgtgaatacatggctccttcactggacgctaggcaagatatggtggtagttgaggtgccaaagctaggcaaagaagcagccaccaaggccattaaggagtggggccagcccaagtccaagatcacccaccttgtcttttgcaccactagcggtgtggacatgcctggggctgactaccagctcaccaagcttttaggcctccgcccctccgttaagcgcctcatgatgtaccaaacaagttgcttcgcaggggggacggtgctccgagtggc

SEQ ID NO: 14879 - DNA, 605 bp, Gossypium hirsutum
  unsure (1)..(605): unsure at all n locations; Clone ID: LIB3829-017-Q6-K6-H11
gctttttgnaagattcanaaagaacaagggggggtgcttgagaaaagggaactagaagcagatacggatcgaatgatgcgagaatatagagctcagttagatgctgaaagggcaagcaagcttgcacatggtagaaaccactccagtagtaaatctagccataaaaaggatcgaaaggacagggggggaaagaaacgcagcagcaaaaaaagaaagcgttcaagacggaggtcttctgagtcaagctcctcgagttcatcctcagaatcttcgagtagtgatgatgaagagagagaatcaagaagatccaagtccaagtctagaagagagaagaaaaagaagcacaaatcaagaaataagaactcaagcaccgagaatgaagaaggtgaaggtccagtcccactgtcaagattttttgggagtgtgaagagttaaaatggtatgttagaagatactaaatttatcataatactgaattcctgcagtagaaaaatgattgttctcccatattttccgaatggattgatggcctgtaatgattgttaattcctttnttttcctgcttcatttctactttgtagtcgccattgatggattgtattcat

SEQ ID NO: 14880 - DNA, 581 bp, Gossypium hirsutum
  unsure (1)..(581): unsure at all n locations; Clone ID: LIB3829-017-Q6-K6-H2
ggnaaaaanaaaaaaaataccaaactgtcgaatcggtgattgaaagcctccaagggtgggtttagcttcgatctttgtaaaagaaacgagatgctttcaaagaaaggcgttaatccgccgtcatttcgtaaaacgggtaccacaattgtcggcttgatcttccaggatggtgtaattcttggagcagacactagagcaactgaaggacttatagtttgcgataaaaattgtgaaaaaattcattacatggccccgaacatttactgttgtggagctggaactgctgctgacacagaggctgtaactgacatggtcagttcacagctccagttacaccgctatcatactggtagagagtccagggttgtgacagcattgacccttctcaagagacaccttttcaactaccaaggctatgtttctgctgctttggtactaggtggtgtagatgtcactgggcctcatttgcatactatatatccccatgggtcaactgacacattgccatttgctacaatgggttctggttccctggcagcaatggctgtatttgaatcaaaatacagggaaggccttactag

SEQ ID NO: 14881 - DNA, 386 bp, Gossypium hirsutum
  unsure (1)..(386): unsure at all n locations; Clone ID: LIB3829-017-Q6-K6-H3
tcgcattgatcttaaanatgttgagagccagaattccgggaaatttagtgaatgtgctgagaatcaagcacggctgcagcgaaacctcatgtacttggctgcaattgcagattctcaaccacaacctccagccgtacatgcccaggctggagggcactacatgcagcaacagcaacaaactcaacagatgacaccacaatcgcttatggctgcacggtcctccatgttgtatggtcagcaaccattttctgctcaccaacaacaacaagctctgcatggtccacttggcatgagctccggtggaagcacaggtcttcacatgctgcanagtgaagctagcactacaggtggcaacggagcacttggagctggagttttccctggtt

SEQ ID NO: 14882 - DNA, 610 bp, Gossypium hirsutum
  unsure (1)..(610): unsure at all n locations; Clone ID: LIB3829-017-Q6-K6-H4
gcgttcgcggacgcgtgggttttttttctgtggtgtttccaccgccgtcgatctcgatccttatcctcgttttcaaacaagctcgaaaaagatggccaacgctgcatcgggaatggctgtgcatgatgattgcaagttgaagttcttggagctcaaggcaaaaagaacccaccgcttcattgttttcaaaattgaggagaagcaaaagcaagttattgtggagaagcttggtgaaccaaccgaaagctatgaggattttactaaatgtctccccgctgatgaatgtcgatatgctgtgtacgattttgattttctaacggccgagaacgtaccgaagagcagaatctttttcatagcatggtctcccgacacgtcaaggatcaggagcaagatgatttacgccagctccaaagatagattcaagcgagaactggatggaattcaggtggaattgcaagcaacagatccaactgagatgggtctcgatgtgttcaaaagccgtgctaactgaatacggttcttttaggcatttgcaaccgggaagcttccttccttcctacagtntgtctttacttaagtgaaatgtttataggtttcgaaacggcaaact

SEQ ID NO: 14883 - DNA, 597 bp, Gossypium hirsutum
  unsure (1)..(597): unsure at all n locations; Clone ID: LIB3829-017-Q6-K6-H5
gcgttcgcccagcgtccngtgagcccattctggtggtgaacgtgaaattcagaggaccatgttggagttgctgaaccaactagatggatttgattcaagaggagatgtcaaagtgattcttgcaacaaatcgaattgaaagtcttgatccagctttacttcgccctggtcgaattgataggaagattgaatttcctctccctgacatcaaaaccaggaggcgcattttccagatacatacctcaaggatgacattggctgatgatgtcaacttggaagaatttgttatgaccaaagatgagttctctggagctgatataaaggcaatatgtactgaagctggtctacttgctttaagggagcgccgcatgaaggtgacacatgcagattttcaaaaggccaaggagaaggtgatgttcaagaagaaagaaggggttccggagggtctttatatgtagaaaaacttgttatatttatatatattccagcgatattcatgttatgtatttctgaatccagtttgctctaagcatttttttttgtcttacgaacaatgtggtatggtatatacgtttcttgtatttcctagcaagcgcct

SEQ ID NO: 14884 - DNA, 303 bp, Gossypium hirsutum
  unsure (1)..(303): unsure at all n locations; Clone ID: LIB3829-017-Q6-K6-H6
ctcatggccccatggaaacagaacatcaatgctaaattagttctacttggggatgttggagctggaaagtctagtcttgttttgcgcttcgttaaagggcaatttgttgaatttcaggaatcaaccataggtgcagcttttttctcccaaacattggctgtgaatgatgcaactgtgaagtttgagatttgggatacagctggtcaagagaggtaccatagcttggcaccaatgtattacagaggagctgcggctgctatcattgtgtatgatattacanatcaagcatcatttgagagagcc

SEQ ID NO: 14885 - DNA, 590 bp, Gossypium hirsutum
  Clone ID: LIB3829-017-Q6-K6-H7
gcgttcgctttcaaacaatcccttctccctagcttgctttactcttcttcccccaactcattctctctggatcggctcctcaacgccaacagccctgctttctctgcttcgcgctccactatacccgatgctcctgcggcctcttcctcgccatcgatcaaggcgagaactttcatgatcccctcccccaatgagcccgggaagaagatcgagatgtattcgcctcagttctacgctgcttgtacctttggcggtatccttagctgtggtctcactcacatggccgttactcctcttgacctcgtcaagtgtaatatgcagattgaccctgcaaagtacaagagtatttcatctggttttggagttctactaaaggagcaaggagtgagaggcttcttccgtggttgggttcctacccttcttggttacagcgcacagggtgcttgcaagtttggattctatgagttcttcaagaagtactatttctgaccttgctggacctgaatactttgccaagtacaagactctcatctatcttgccggctctgcatctgctgaggtgattgctgatgttgcactttgcccctttg

SEQ ID NO: 14886 - DNA, 597 bp, Gossypium hirsutum
  Clone ID: LIB3829-017-Q6-K6-H8
ttttctttctcgattttctctttagccaaaaaagagcagatcttcgtcaagactctaaccggcaagacgatcactctcgaggtcgagagctccgacacgatcgacaacgtgaagaccaaaatccaagataaggaaggcatccctccagaccagcagcgtctgatcttcgccggaaaacagcttgaggacggccggaccttggccgattacaacatccaaaaggagtcaactctccacctcgtcctccgtttgcgcggtgggatgcaaatcttcgtgaaaaccttgaccggcaagacaatcactctcgaggtcgagagctccgacacgatcgacaacgttaaggcgaagatccaagacaaggaaggcatccccccagaccagcaacgtctcatcttcgccggaaaacaacttgaagacggccgtaccttggccgactacaacatccagaaggagtcaacgctccatcttgtccttcgtttgcgtggcgggatgcaaatcttcgttaagacgcttacgggaaagacgatcactctcgaggtcgagagctctgacacgatcgacaacgtgaaagccaaaatccaagacaaggaaggcatc

SEQ ID NO: 14887 - DNA, 364 bp, Gossypium hirsutum
  unsure (1)..(364): unsure at all n locations; Clone ID: LIB3829-017-Q6-K6-H9
tagaaacgaatgatttgagccaccgcctctgctccgccgccagccataaaggtttctattcttgctgatgagatcttaaagaatgtggagtatgatgccttgaggattgtcttcaacaagtttcactcagtagtttcatttgtaccgacagtctcaactgtattatcacctgaaattgttgaaagggaatctgaatctgggggaaagcttggtgaactagacccctatgaagtcgagggtggtgagacaaagggtgaaatacttcaaaatctggctgagttccagttctcttgtgtcatgttcaaatgcgnntttgagaatgcttgtagtgagcaaggagcanggatgtctgctatggatagct

SEQ ID NO: 14888 - DNA, 485 bp, Gossypium hirsutum
  Clone ID: LIB3829-018-Q6-K6-A1
gctgcaggagtaaaactgcaggatctggaagaatgggctggccatggccgatttatccgggtgatgcccaacacaccatctgctgttggtatgggagcttcagttatgagcttgggaggagctgcaacagaacaggatggggaattagttggtaaattatttggagcagttggcaagacatggaaagctgatgagaaactgtttgatgctgtcactggccttagtggcagtggtcccgcttatatatatttagcaattgaagctttggctgatgggggagtgactgctggtcttccgcgagaactagcattgggacttgcttctcaaactgttttgggagcagctgctatggctgttcaatctgggaagcaccctggtcagctgaaagacgatgttacatcacctggtgggactacaattgccggcattcatgagttagagaagaatggtttccggggaacattgatgaatgcagttgtggcagc

SEQ ID NO: 14889 - DNA, 573 bp, Gossypium hirsutum
  unsure (1)..(573): unsure at all n locations; Clone ID: LIB3829-018-Q6-K6-A10
tacatagcctatcaggnaagatttgcctttgcagatttcaaacgtctcaatttgcctgaacggttcaagagttcattcgatttcattgatgggtataacaagcccgtcaagggaaggaaaattaattggatgaaggctggaatattggaatcacatagagtcttgactgtaagcccatactatgcccaggagcttgtatctggtgaagacaaaggtgtagaacttgataacatcattcgtaaaactggcatcaccggcattgtgaatggcatggatgttcaagaatggaatcctgcctctgacaaatacatcagtgtcaaatatgatgcaacaactgtaatgaaggcaaagccattgttaaaggaagctcttcaagctgaggtgggattgccttgcgacggagatgttcctttgatcggattcattggtaggctagaagagcagaagggttcagatattttggcagaagctattccgaaattagttgctgaaaattgccagattgtagtccttggcacaggcaaaaaggccatggagaagcagattgagcagctggagatcaataccctgaca

SEQ ID NO: 14890 - DNA, 560 bp, Gossypium hirsutum
  Clone ID: LIB3829-018-Q6-K6-A11
cttttggcaataggatcatccacaccactgctgcttcttggatcgatcgatacgtcgtcgcttactacccggaaacgctcatcaccggtattgctgttggagatgaggttttaacaaccgtaccgtcctcagctcctttgctgcttcctgcaattcagtctctttacggtgccttagtggctgcaaatttgcatacgcaaatcaaggtttcaaccccacatgcagcttctatcattcttgatacctttcctccttctcaggcttactttaaccaaagcttgacttcagttatggtacctttgcttcagtttttgtcaagaactggctcgcctttaatgatgaatctttatccttattatgtgtttatggagaataagggtgtggttcccttggataattccttgtttaagccattgacaccatctaaagaaatggtcgatcctaatactttgttgcattacactaatgtgctggatgctatgattgatgctgcatatgtttctatgaagaatttaaatgttaccgatgttgtggtgcttgttactgagagtgggtgggct

SEQ ID NO: 14891 - DNA, 596 bp, Gossypium hirsutum
  Clone ID: LIB3829-018-Q6-K6-A12
gatttctaaaaccctaggtctctcatactaagttgctattaaggccattttccctcgctcggcactgccttccccctcgtatcagcttcaccggccatgggtatcgacttggtcgccggtggcaagagcaagaagacgaagagaactgctcccaagtccgatgatatctacctcaaactcatcgtcaagctttaccgatttctggtaagaaggactggcagcaaattcaatgctgtgattttgaagcgtctttttatgagcaaagtgaacaagcctcctctctctctatccagattgattgaattcatgaagggcaaggaggataagattgcagtggtagttggaactgtcaccgatgacattcgtgtatatgaagttcccgctctgaaggttactgcactaaggttcactgagacagcgagggcgagaattgacaaggctggtggggaatgtttaacatttgaccaacttgctcttcgagcacctcttggacagaacacggttctcctccgaggtccaaagaatgctcgtgaggctgtgaagcacttcggacctgctcctggtgtgccacacagccacaccaagccctatgtgcg

SEQ ID NO: 14892 - DNA, 555 bp, Gossypium hirsutum
  unsure (1)..(555): unsure at all n locations; Clone ID: LIB3829-018-Q6-K6-A2
aaacgatcttgccagatagtgatggtgcaattgatggtcaccttcgtgaagttgggcttacatttcaccttcttaaggatgttccggggcttatttcgaagaatatagagaagagcctggtagaagcatttcaaccattgggcatatccgattggaactcccttttttggattgctcatccaggtggtccagcaatattggaccaggtagaagccaagttagcactgaagccagagaagctacgagccacaaggcacgttctttcagagtatggtaacatgtcaagtgcttgtgttttattcattttggatgagatgaggaagaaatcaagggaagatggacttcagacaacaggagaaggactggagtggggagtgctctttgggttcggacctggcctcactgttgagactgttgtgctccatagtgttgctgcttaaagttaaacaaacatgccttttaagtaattggncgngctccacttggcttgcagntttatcttcttcttttttccttttttagattatttaaatcctatgaaatttggtgcttatt

SEQ ID NO: 14893 - DNA, 579 bp, Gossypium hirsutum
  unsure (1)..(579): unsure at all n locations; Clone ID: LIB3829-018-Q6-K6-A3
gtccaatttgtcgtttagaaagttggcatgttgtactgcaaatgcctggtggagaagttattgatcctccccattctttgaaagctactgaagattgtcattttgatcagactttggagattgatgggggcattcctgacaaagtgaactgctatgaaggagtattctataattactttagcataggaatggatgcgcaagttgcttatggattccatcatttacgtaatgagaaaccttaccttgcgcaaggtcctattacaaataagattatctactccagttacagttgcactcagggctggtttctcacaccttgtgtgagtgatccaagtttaaggggactcaagaatattttaaggatatatattaaaaaggccaggtgctcggaatgggagcaaattcccgtccctagaagtgtgagggcaattgttgctttaaatcttcataattacggaagtgtttctatatccttggggnaagctaaaaccagagnatttggaaaagagaggctttgtggaggcccatgccgatgatgttctcctagaaaatttnggattaaagcaagggtggaatgca

SEQ ID NO: 14894 - DNA, 514 bp, Gossypium hirsutum
  Clone ID: LIB3829-018-Q6-K6-A4
ggctgagaaccgaggaagcaaatccgcctggctgtgtcacttaagctttcaatccttctggctctaacagtggttgttgcattagcatttgggcataacatatgggctgcttacttcaccaacactgcttccattattaaccaatttgcttcaatcacacccttccttttaatctccattactatcgattcttttcaaggcatcttatcaggggtggccagaggaagcggatggcaggtgttggctgtgtgggccaacttggggaccttttatttaattggaatgccagttgcagggcttcttgcttttaagtttaagctttatggtaagggtttgtggatagggttgatatgtggtctttcatgccaagctgctgccctcctgcttattactttgtgtagaaaatggactaaaattgagctttcctgaccaattaatattgaaccatagttcaatcttaactaatcttcatactttatggggtatttattttgtcgggactttatttaaaata

SEQ ID NO: 14895 - DNA, 572 bp, Gossypium hirsutum
  Clone ID: LIB3829-018-Q6-K6-A5
gcgttcgggaagaggccgctagcagcgatcctaacccggagggttccgatgagcagcagaaacgatccgagatatacacttacgaggccccttggcatatctacgccatgaactggagtgtccgccgcgacaagaaataccgtctcgccatcgccagcttgctcgagcattacaacaaccgccttgagattgtccagctcgatgactccaatggcgagatccgatcggacccaaatctctccttcgatcatccttatcccccgaccaagaccatcttcatccccgacaaggagtgccagaaacccgaccttctcgccacgtcctccgacttcctccgcatttggcgcatctccgatgaccactcccgcgtcgacctcaagtctctccttaatggcaataagaacagtgaattctgcggtcctcttacctccttcgactggaatgaggcggagcccaagcgaatcggcacctcctccattgatacgacttgtactatatgggatatcgagagggagacggtggatacccagcttatcgcccacgataagggaggttatgatattgcctggggc

SEQ ID NO: 14896 - DNA, 593 bp, Gossypium hirsutum
  unsure (1)..(593): unsure at all n locations; Clone ID: LIB3829-018-Q6-K6-A6
atccccgaacctcttggaggcgcacatgctgatcctgtatggacttcccaacaaattagatttgcaatcactcgggccatggatgaactaacaaaaatggatacggaagagttgcttcgtcatcgtatgcttaaatttcgatcaattggaggtttccaagaaggcaagcccgtggaacctgaaagaaaacgaaacatgaagccttcggatgctagcatgttaaatgctgcagatatagaatcagatcttgagaagttaaagaagaatatcttggaggctaaggtaccttccgatcctatcacggaccaagcaatagaaaaacttaagcaggatgttgacaacgaggtcacgagagcgtttatttcaatgggattgcaagagaagcttgaatcacttaagttggagttatcccgagcctctgataatcagacccttaatcgtaatttgaaggtgaaggtggataaacttatgcaagaatttaagcaaaatttgtcgagaccagngacctatcttggtttaaaacaaaagcttgaaaagctaagcatggttagcagactcattgagcagaaagagaaaggtgagaaactgaaagc

SEQ ID NO: 14897 - DNA, 508 bp, Gossypium hirsutum
  Clone ID: LIB3829-018-Q6-K6-A7
gttacttccagccttacttctgaatttccagaagattgcaagttttatcctgcagatacgaaggacgacttgcacaagttcatgtggctttttaaggagcaaagactcacaacaccgcattggagaaatcaacggccttatcttattgctcaaaaagttgatatggtaccagatgactccagtccagagaagtgtacacttctcctcactggttatacgcgtgctcacagcctctcagtgaaccagctggttcatgtgtctggtgcgggggattttcaattgagtagaattgaaattatgaaggatcctatccctttaaatgctagaaaagatcataatgctatggattctgatgacattcaagatgctgagatcattcgttccgtagctcctgatccatcaagccaggagccttttcttgtagagaatgttccagatccacttgctggagaacagacatggcccactgaagtagaaatggctgaggctgaaagaaatcaaaagcaga

SEQ ID NO: 14898 - DNA, 613 bp, Gossypium hirsutum
  unsure (1)..(613): unsure at all n locations; Clone ID: LIB3829-018-Q6-K6-A8
gctgaggcttgccaaagnatagaacatgattttgaggttcttggtgttaccgcaatagaggatcgtctacaggatggtgtacctgaaacaattgagacactcaggaaagctggaattaatttttggatgctgaccggagacaagcagaatactgccatacagattgctctttcttgcaattttatttccccagagccaaaagtcagcttcttctaattgacggaaaaactgaagatgaagtttgtagaagtttagagagagttttgcttacaatgaggataacatcttcggaacctaaggatgtggcatttgttgttgatggatgggctcttgaaattgcacttaagcattataggaaagcctttacagaattagctattttgtcaaggacagctatatgttgtcgtgttacaccgtcccaaaaagcacagcttgttgaactcttgaaatcatgtgattatagaacattggctattggggatggtggaaatgatgtgagaatgatacaacaagctgatattggtgttggcattagtggaagagagggctgcaggctgcaagagcagctgattatagtattggaaagttcaggtttctcaaaagataatacttg

SEQ ID NO: 14899 - DNA, 576 bp, Gossypium hirsutum
  Clone ID: LIB3829-018-Q6-K6-A9
gcaaaatccaattcctttgttgggacgcacgagtacttggctcctgagatcattaaaggagagggtcatggagctgctgttgattggtggaccttcggtatcttcctttacgagcttctctgtggtaggacaccttttaaaggtgcaggtaatgaagaaacgttaactaatgttgtgctagagagccttaagttcccagacagccctcttgtgagtttccaggcaagggatctcatcagagggctgctggtgaaggagccagagaatcggctgggaacagaaaaggggctgcggaaatcaagcaacatcctttctttgaaggcttgaattgggctttgatacgatgtgctgttccaccggaactgccagagttgtatgaatttgggattctgagcatgatgtccccggaagcagagagcaattatttggaatgtaaaggtacaggagaccaccttgaatttgagctgttttgatgtaaacatgtactttaggagatggatttccataggataccccttctccatggctggccatgagccatgctttccttgttgtaattaataatgtaccccatga

SEQ ID NO: 14900 - DNA, 519 bp, Gossypium hirsutum
  unsure (1)..(519): unsure at all n locations; Clone ID: LIB3829-018-Q6-K6-B1
gcaagatattgatggactgctcgccggtgctggttataaagtccggtcgtcggagctacgacaagtagctcagcgactggaacgactcgaaaccgccatgggtaattcgcctgcagatttctctcaacttgcctccgatgctatactctataacccttctgatctggcctgctgggtcgactcgctgctaactgagttcgctgagcctcctcccacttgctcctccgacttcatcgtggatcctgtaaacaatcaaacggtggtaaacagcgcgtggaccgccgccgaacctcatacaccgcaggtgcaccagaatattacttacgacgagcaacagagtttggataatcagttgacggttgtcacggccatggaagaagattcgggtataaggctggtccacatgttgatgacttgtgctgagtgcgtccaaagtggagatctctcattggctacttcattgntcgacgacatgcaagggttactgactcatgtcaacaccctttgcggtatccggta

SEQ ID NO: 14901 - DNA, 334 bp, Gossypium hirsutum
  unsure (1)..(334): unsure at all n locations; Clone ID: LIB3829-018-Q6-K6-B10
tcgctccnagtggagagtttctgagagttgtggtgattaaggagatcaaaggttcccaatatggagtgcagctagagagtgctgtgagggaccgattggcagctgacgacaaatacgaagaggaagaggaagaagccttggaaaaagttgttgaattcttccagtctaaatatttcaagaaggattgagtcatcacttaccattttccagcaaattcagccactgctgaggtatattttgagtccataagaaaaaccattcattcattcatgttttaatatgatagtttttgtgtatgtgtggatgtgctcaaacagattgcctttcctactgt

SEQ ID NO: 14902 - DNA, 591 bp, Gossypium hirsutum
  Clone ID: LIB3829-018-Q6-K6-B11
ggcaccaattcactcccagttatcatcatgaaccacccaggacagattggaaatggctatgcaccggtcctcgattgccacacctcccatattgctgtcaagtttgcagagctcttgaccaagattgacaggcgatctggtaaggagcttgagaaggagcctaagttcttgaagaatggtgatgctggtatgattaagatggttccgaccaagcccatggttgtggaaactttctccgagtaccctccacttggacgttttgccgttagggacatgagacagactgttgctgttggtgtgatcaagagtgtggagaagaaggacccaactggagccaaggtgacgaagtctgctgccaagaagggcaagtgaacctcgggattttgttgattcgacaaaagtttatcatggttactccaatgaaattggttcatgttagtaggtccatcactggacgtttagttacatgttttaatgcttcaccgtcatctcttggatattgttcccagaactgggttcttgataggcggtggtgaggtttatatttggagtcaatagtgtgtcatcattaatattattatgcgttatcga

SEQ ID NO: 14903 - DNA, 607 bp, Gossypium hirsutum
  unsure (1)..(607): unsure at all n locations; Clone ID: LIB3829-018-Q6-K6-B12
ctgttctngaagccatctgtgctggtttcgaggagactactgaaccagccgtttgcttgagcggtgatgtggagacaaatgaatgcttggataacaacggtggttgttggcaagataaagcaaccaatctcacagcctgcaaggatacatttcgcgggagagtctgtgaatgtcccttggttgatggtgtacaatttaaaggagacggttacagtcactgtgaagctagtgggtctggaaggtgcaaaattaataatggaggttgttggcatgatgcacgagatggacatgcatactccgcttgtttggatgatggaaatggtaaatgccagtgtcctccagggtttaaaggtgatggtgtcaaaaattgtgaagatattgacgaatgcaaagagaagaaagcctgccagtgccctgaatgtagctgcaaaaatacttggggaagctatgaatgcacttgcagtggagatcttttgtatatccaggaccatgatacctgcataagtaagagcagtaccgaagtaagatcatcatgggcagccgtttgggtcattttaatcggcttggcaatggccagtggtggggcttatctcatttacaaatatag

SEQ ID NO: 14904 - DNA, 484 bp, Gossypium hirsutum
  Clone ID: LIB3829-018-Q6-K6-B2
cgatggatgactgaacgagagtccccttcaatttcaacctctcttaactgaaggaataaaccgagatgaatcgcccagaaacccgccaacgcttctgcagtaaaaacagaagcgccaaaattgatttttaccctcggtccagtcggagcaacccatctgtcagtaagaatcggcctcgctgatcaagagaaaagagattcgattctagatcggggaaaaagtaaagtttacgaggaataggctcgactattctcattttgtatcgagttctgacaagccggtttgacgatcaggacggtcggaggcacgctcacactatcaacggaccatctcggtatggtggcttgcatattttgggaatatggcatgtataacattataatccttttgtgtatataatcttatgatatagctcatggatggcatggaaatgtttgagaatgattagctattggagtggctaatagagattatatttgataac

SEQ ID NO: 14905 - DNA, 594 bp, Gossypium hirsutum
  Clone ID: LIB3829-018-Q6-K6-B3
accaaagcgtcgtggttcttttcttgttaagtacactgtaaaagaggccgatactgaggagattcaaccccttgtctgtgataatggaactggaatggtgaaggctggttttgctggtgatgatgctcccagggcagtttttcccagtattgttggccgaccccgacacactggtgttatggttgggatgggtcagaaggatgcatatgtaggagatgaggcacaatctaaaagaggtatccttactttgaaatatcccattgagcatggtattgtcagcaactgggatgatatggaaaagatctggcatcatacattctacaatgaactccgtgttgctcccgaggagcacccagtgcttctcacagaggcacctctcaaccccaaggccaacagagaaaagatgactcagatcatgtttgagaccttcaatgtgcctgccatgtatgttgccatccaagctgttctctctttgtatgccagtggtcggacgacaggtattgtgctggattctggtgatggtgtatctcacactgtgccaatctatgaagggtatgcccttccacatgccatcctccgtctagaccttgctgg

SEQ ID NO: 14906 - DNA, 361 bp, Gossypium hirsutum
  unsure (1)..(361): unsure at all n locations; Clone ID: LIB3829-018-Q6-K6-B4
gtgaaactgcatcggngatgcaagaatcctgaaggaagggatagaaaaacgggacgattcgaagtcgtctccaaagacgtgggcgttcccctcgtggcttttgctctaaaagacagcactaaatacacggtgtttcaaatatccgatgccttgaggaagttcgggtggatcgtccctgcgtgcacgatgcctgcagatgccgaacacatcgcagtcctgcgcgtggttgttagggaagacttcagttgtagcttggccgagaggcttatctcgcacattccagaggtggtgaagggactcgactcgcttccgcgtctattgtgctagattctctccttgtaccgttgcgttggagttgttt

SEQ ID NO: 14907 - DNA, 588 bp, Gossypium hirsutum
  Clone ID: LIB3829-018-Q6-K6-B5
cggacgcgtgggcttgaaatgagcagaaggcagcggcgtcatcacttgttaggtccaacaattctcccatctgacgcacccttctttatcactcatcaaaacccatttctcaatcacctttcttcctttcaaatacccccaaaaatctcttcaatcaacgatatcaaaagctccaattcagccccaactcaacatccataatggcatcactttccaagtctgaacaagccagggaaccccctgctctttctcttccatcacctcctctcagcaagttcaagattgggctttgtcagctgtcagtgacacccgatgaagagaggaacataaagcatgctaggaaggccatcgaggaggctgctcaaaagggtgctcagcttgttctcttgcctgaaatatggaacagtccatattcaaatgacagcttcccggtttatgctgaagatatcgatgcaggtggtgatgcttctccttcaacagctatgctgtctgaagatgctagtcgcctgaagatcacgatagttggtggctctatacccgaacgctgtggtgataagttgtataacgcttgttgtgactttggtactg

SEQ ID NO: 14908 - DNA, 428 bp, Gossypium hirsutum
  Clone ID: LIB3829-018-Q6-K6-B6
gcagttcaatcctcaaagctcgtgtttctctatcccacctggtctgggacatggtggccaagcacctggtcttaatagtgttacctctgcaagcttacagcagcaaccaaactcaatccaccagcagtctggtcagcaggcattggcaacaagtgttccgaaggatgctgatgttggcgttgcaaaagttgaggaacaactgcagagtttacctgatggttcaagttctgaagctattccaacttctgggcttgccaaagatctcatgaatgaagatgatttgaatgctccatatgcagttgattctgctgctgctgcaataggtttttagcagcaacctgctggacttttacctgatatccctgcttttattatccatgtcctaccagtcttgcaggttttttcatctgcacacatgattactagct

SEQ ID NO: 14909 - DNA, 498 bp, Gossypium hirsutum
  unsure (1)..(498): unsure at all n locations; Clone ID: LIB3829-018-Q6-K6-B7
ggagagtgcctcacacttataaactggtcagtccaccggatccccggctgagtttaatctactaaagcattcaaaggcagaagaggaaggtgaaaagaagaaagaaaaattctcaagcaagatcttgctgctgatttttctggaggccgtctaccatgttcttgatgaatctacacattttagcagtgatcttcagccatcatccaagttcctcaggaagcagagcatatggattctcgaacttgggattttgagtgcaaagaatttgcagccaatgaagatgaaggatggttagttgactgatgcatattgtgtcgcaaagtatggaaacaaatgggtgaggactagaactcttcttgatactctgtatcctcgatggaacgagcagtatacttgggaagttcatgatccctgtcctgtnatcaccattggagtgtttgataattcccacacccctgggagcatttatgatgcctaggtatcaaagaatcgggaagg

SEQ ID NO: 14910 - DNA, 469 bp, Gossypium hirsutum
  unsure (1)..(469): unsure at all n locations; Clone ID: LIB3829-018-Q6-K6-B8
cttgcctcttcanaggaaaggtccttataaaaggaaaagcttcgttgttagcagcagttgattactatgttggtatgcatagtgatatctttgtctcagcctctcctgggaatatgcacaatgcattggtcggacaccgaactttcgagaacctgaagaccataagaccaaacatgccattgttagggcaactcttccttaacaaaaacattacttggttggaattccgtcaagcagtggtggaaggtcatcaaaacagacaaggtcaactccggttaaggaaaccgaaacaatccatatatacatatccggctccggattgtatgtgccaagcttaaatccctaaacctcattttataggtatgccaagtttacgcttactatattttattgatttcattactgcaactattaattgtggcttgtattattggtatcataaataagaagcaatcccatttctctcatc

SEQ ID NO: 14911 - DNA, 577 bp, Gossypium hirsutum
  Clone ID: LIB3829-018-Q6-K6-C1
gtgatcttagttagcttttttggtcttcgaaaatggcctctgctaatgctctttcttctgcttctgttctttgcacctcaaaacaggggaatctgggtaggaggggaaatcagcgccagaaccaaagagtaaactataggcaaggaaatagccgatttggtgtaagagcttgtgcaaaggaaattgcttttgaccagagctcgagggctgctatgcaagctggcattgataagcttgctgatgctgttggccttactcttggtcctagggggaggaatgttgtcttggatgaatatggaagtccaaaggtagtcaatgatggagtgactatagccagagcaattgagcttcctaatgccatggaaaatgctggtgcagctcttattagagaggttgctagtaaaactaatgactctgctggtgatgggacaactacggcatccatacttgcacgggaaataatcaaactaggacttctgagtgttacctctggtgctaatccagtctcagtaaagaggggtattgataaaactgtacaaaggttggtggaagaacttgaaaaaaagccaggcctgtt

SEQ ID NO: 14912 - DNA, 336 bp, Gossypium hirsutum
  Clone ID: LIB3829-018-Q6-K6-C10
caatgcccttgctacatttcaattgtgagcctattattacctctgctctgtgccaaacggttatatgcttaatgaatccgaaaatgtcacaaaatcaaagaatgattcttaaacatcattaatggttatgaagaagtcctaatcttataggaggaagttttgctggtctgctgtgtataagggtgtactaattatcctctgtggaaaacatttcaagaattatattttgcctactatattgtacgagtaacattgatcaagttttctggatgcctaaataacggtgctgttatggtcccattaatgaaattgggttattcttttttccgattgatg

SEQ ID NO: 14913 - DNA, 610 bp, Gossypium hirsutum
  unsure (1)..(610): unsure at all n locations; Clone ID: LIB3829-018-Q6-K6-C11
agtgaccaccctcagcttccatccatcaagatccgtcatccctcctcccctcaccacccctcctccgccgctacccctactcctaccgctggcgcccgccgtaagatcggtgtagccgtcgacctctccgacgaatcagctttcgccgtccgttgggctgtccaaaactacctccgacccggtgacgccgtcatcgttctccacgtctcacctacctccgtactctatggagccgactggggcccactcccccacaccccacaaagcgcggaaaccccggagtcccagaagcaaatagaagacgaattcgatgccttcacggcttcaaaagtggcggatttggccagacccttgaaagaatccggggttccctttaagattcacatagtgaaagatcatgatatgagggaaaggttgtgccttgaagtggagaggttagggttgagcgccgttataatggggagtagagggtttggagccgagaaaagagggagtgatgggaagttgggcagtgttagtgattattgtgtccatcactgtgtttgccctgttgntgttgttaggtaccctgatgataaagatggcgggagtggtgagcctgtggttacca

SEQ ID NO: 14914 - DNA, 529 bp, Gossypium hirsutum
  Clone ID: LIB3829-018-Q6-K6-C2
gaaagacccgtcttgcgagagattttttgctttgcctgctgaagagaagcttcggttcgatatgtctggtggcaagaaaggtggtttcatcgtctccagccaccttcagggagaagcagtgcaagattggcgagagattgtgacatacttttcatacccattgaggagcagggactattcaaggtggcctgataagccagagggttgggttgaagttacaaaggagtacagcgagaagttgatgggcctagcttgcaagcttcttgaggtgttgtcagaggccatgggtttagagaaggaggccttgactaaggcatgtgtggacatggatcagaaagtggtggttaacttctatcctaaatgccctcaacctgacctcactttaggactcaagcgccacactgacccaggcaccatcacactcttgcttcaagaccaagttggtgggcttcaggccacccgggacaatggcaagacttggatcactgtccaacctgtggaaggagcctttgtggtcaaccttggagac

SEQ ID NO: 14915 - DNA, 577 bp, Gossypium hirsutum
  unsure (1)..(577): unsure at all n locations; Clone ID: LIB3829-018-Q6-K6-C3
tcggnaaacacaaaactagggttttagagagaacgggagccaaagtgagagagaagaggcagaaatttttagtagtagggttttattatattgcttctctagggtttagaaaatggtggccgacaaaggaaagaagatgaaagtagcagagaaagtagaggaagagaaccatgaacaaatagatggagacctcgtcatttccatcgagaagcttcaagagatccaagatgagcttgagaagatcaatgaagaggcaagcgagaaagtcttggaagtggagcagaaatacaatgaggttcgcaagccggtctatgataagcggaatgaaatcatcaattcaattcctgatttctggttaacagctttcttgagccatcctgctcttggtgatcttttgactgaagaggaccagaagatattcaaatatattaactcacttgaagtggaggattttaaagatctgaaatctggatactcctttactttttactncaagggcaatccatactttgaaaatacaacacttacgaagacctttaccttcctcggtgatggaaccataattacccgttcccca

SEQ ID NO: 14916 - DNA, 549 bp, Gossypium hirsutum
  unsure (1)..(549): unsure at all n locations; Clone ID: LIB3829-018-Q6-K6-C4
gcattatactcgtactaagaagaactagttgtaggcagctattatatcgtttctcctttctcccttctcttaagagtagaatgattattggaaggttacgccaatggttaagtctactggtctgtgtgcttgctgttatactactcaaatctgaaggcgctagtgtagggattacttatctgcaggatgccgtagcgaaaggagctgtttgtttggatgggagtccaccagcttaccattttgacaagggctctggcgctggacttgataattggattgttcacatggagggtggaggatggtgtgaagatgtgccgacttgcctctctcgtaagaacaccgatttagggtcatcaaagcaaatggtgaagcaatttggcttctctggactcttgagcggccagcaaaaatccaatccagatttctacaattggaatcgaattaaggttagngtctgcgatggatcatcgttcaccggggatgctgtcgatcgagctaataatctcttttttcaaggaaacagcttttgggaattatcattggtggtct

SEQ ID NO: 14917 - DNA, 481 bp, Gossypium hirsutum
  Clone ID: LIB3829-018-Q6-K6-C5
ggtttatcttagtgctgaggttcaatgttatgatgaaatggggttatggtggagagtgtgatgtctgatattttaatggttaagaacactcatgtctggtatagtttgtttaaatgtgcttcctgatcaaaaaaaaaaaaaaaaaaaaaaaaaaaaaaaaaaaaaaaaaaaaaaaaaaaaaaaaaaaaaaaaaaaaaaaaaaaaaaaaaaaaaaaaaaaaaaaaaaaaaaaaaaaaaaaaaaaaaaaaaaaaaaaaaaaaaaaaaaaaaaaaaaaaaaaaaaaaaaagggggcgtgttttaaaattatacaaattttaataccgggacaaccccgcttttaccttttttaatggggcacaaaaaaataactccttgcccccgtttttcaaaacggggaggaggggaaaaaacctgcgttccccccaaattttcccctttttgaactccccttttttccacatttgttgtaaatcaaaaagc

SEQ ID NO: 14918 - DNA, 595 bp, Gossypium hirsutum
  unsure (1)..(595): unsure at all n locations; Clone ID: LIB3829-018-Q6-K6-C6
gaaattccaaanaaaagcttgtttggctgctgtccaggtgaatggaccagtgttggttgaagatcatgtctttgtttcaatgcactaaagggtcttccagggccatacgtcaagtggtttttgcagaagattggccatgaaggtttgaataacttgttgatggcatacgaggataagtcagcttatgctttatgtgcgttttcttttgcccttggtcctgatgttgaacctgttacctttctgggaaaaaccccgggtaaaatagttccggccaggggacccaatgactttggatgggatcctatttttcagcctgacggctatgaccaaacttatgcggagatgccgaaggaagagaagaacaagatttctcaccggtcaagggctcttgatatggtgaaatcccactttgccgaagcaggatacaatttcagcacctccaactaaagagtgagccatatctgtctttgttgttaccattgtatggtagattcttagactgttacaagccttctccaccatgttcacttctgatttctataaagggtatatcaggaacggtggaaacagtgaaagcaagtttctcgcatggaaa

SEQ ID NO: 14919 - DNA, 606 bp, Gossypium hirsutum
  unsure (1)..(606): unsure at all n locations; Clone ID: LIB3829-018-Q6-K6-C7
gaaccattggcatgtgatcatggctaggaagtatagagaacaatcgagtgcctacaggaggcggaagctgagtcaatctgtttatagaaagatggaagaaactccgaacattgtctgcagagatgcaggaacaaaggcagaaccagccccctactgtctcaatatttcggatagacgactaggcattatctcccactatcagtttgggatcttcaacggtggtgatgcaggtggggttaatggtgggtcaaatgtttcaccccacatgaccagtgagagagaagcaatcctaagcagcgaggccccttatcgtaatgggttttgtgcacaagcacaaccgccaccttttgatttcttccctgatcttagcaatgacatgatgggcatgttcagccagaccagattttgggataggcccatcgatgaaacccaagtccgtggctactatccccagcgtcaacatcagcagctgcacccttcacacatgatgacaatgcaacagtcagagntcctcagcttccaaagtaacacagattccacagcatcaataacacctcaagtttcagccattgaaccttcatcattcgtggcaggaagcagtaacta

SEQ ID NO: 14920 - DNA, 618 bp, Gossypium hirsutum
  unsure (1)..(618): unsure at all n locations; Clone ID: LIB3829-018-Q6-K6-C8
tanaaaaaaanagcctctgnaaatcccanatctctctttggaacccaaatttctaaggaaaatggtgcacaaatcattgatctatgcatttgtatctcgtggggaagttatcttagcagagtatactgaattcagtgggaatttcaattccatagcttttcaatgcctccaaaagcttccttcttctttctacgacaagttcacttacaactgtgatggccacaccttcaattaccttgttgacaatggctacacatattgtgttgttgcagatgaattggctggaaggcaagtaccgattgcttttttggagcgtgtcaaggaggactttgtgtcaaaatatggtagtggaaaggctgctactgctcctgccaacagcctgaacaaggaatttgggccaaaactaaaagaacatatgcagtattgtgttgagcatcctgaagaaataagcaagcttgctaagatcaaatctcaggtttctgaagtcaaaggtgttatgatggagaacatagagaaggtgttggatagaggggaaaagatagagcttctagtggataaaactgagaatcttcatcagcaggctcaagacttctggaatactgngacgaaaatccgaaa

SEQ ID NO: 14921 - DNA, 533 bp, Gossypium hirsutum
  Clone ID: LIB3829-018-Q6-K6-C9
atttgccccatccgttctctccttttggcgatagcgtttcccaaggttttcattgttttctatctctttttagacataagttcacttccagtcttcttagtccaaatttctagttcattgttcctttactctcatatcatgctgaatcagctcctcgttctccagagaagcaacattacgatgaataatcgatttcgtggtcaaaacttagttcatcggacccttatctaccaaccccgacactgatctgaactctctgttgttaaatacggcgtcgaactggatcttcataatcggtacgtcttctctatttctttgattgagcctcgtatgtgatgaagtcattttaactttaatccctttgtatactgccaaatgatcctgaatttttcgtgcgaggtctctactcgttgtatttacccgttcatgcaaaagttggttccttgaatgccacagtatccataagccataacaaaaatgcctgcattgttcatttgttccttggttggagatcagggtgaaccactcccaga

SEQ ID NO: 14922 - DNA, 453 bp, Gossypium hirsutum
  Clone ID: LIB3829-018-Q6-K6-D1
ggagtctccggaatattcttccgttagtcgcgatcgcgccgggcggtgatcggaatctgattggttttttgttcttctttttacttttttggtgtgtgcgaatcctttattttttgtcagcgaagatggtgaactctatggtagagagagctacgagtgacttgctgatcgggcctgattgggctaggaatatcgagatctgcgatatgcttaatcacgaccctgggcaagcaaaagatgttgtgaaaggcataaagaagaagcttggaagtaaaaatcctaaagttcaacttcttgcactaactctgctagaaactatcataaaaaactgtggggacattgtccacatgcacgctgcagagagggatgttcttcatgagatggtttgaatagtcaagaaaaagcccgactttcatgttaaagagaagatcattgttctgcttgacacttggc

SEQ ID NO: 14923 - DNA, 354 bp, Gossypium hirsutum
  Clone ID: LIB3829-018-Q6-K6-D11
ccaaggaggtaagtgaacgggttggggatttcttggatgatgggctgaatggacctatggattccattgatggagggtggattcaaggcccacgagatttgaacgttgagaaagaaattgatcccctgtatcaaaagagcaacatttagctgtttcaagcaatgactttagaggggagaaagatctatctttgggtggatctcaatacacgctttttgctttcatctaaattctaaagcttatacaattttgacccactattttggctctacaaactaatctctaatagacgctgggttgatgtgtttgctttgtttatgcattttatgaagtcgagtttcctactttcattct

SEQ ID NO: 14924 - DNA, 602 bp, Gossypium hirsutum
  Clone ID: LIB3829-018-Q6-K6-D12
gggatggggaggaaacatggttcaaccctcaccggaggtgttatagctaacaaagagggtatctcttgggctactaaggacaaggtacaacaggctaattactttggttcattgactcaagcatcaacgatccgagttgggtcctacaatggagaagatatttatgctccatttaagagtcttcttcctatggtgaacccaaatgatattgtgtttggaggatgggacattagtgacatgaacctagctgatgcaatggctagggccaaggttttcgacattgatctgcaaaagcaactgagaccctacatggaatccatggtcccactccctggaatctacgatcctgatttcattgctgctaaccaaggtgaacgtgccaataatgtcatgaaggggaccaagaaagaacaagttcagcaggtcatcaaagacatcagggagttcaaagagaaaaacaaggtggacaaggttgttgtactctggactgcaaacactgagaggtacagcaatgtcattgtggggctaaatgacaccgtggaaagccttatggcttctttggagaagaatgaatcagagatttctccttccactttgtatgc

SEQ ID NO: 14925 - DNA, 582 bp, Gossypium hirsutum
  unsure (1)..(582): unsure at all n locations; Clone ID: LIB3829-018-Q6-K6-D2
gttcgatcgtttaacgcaaacccatttttaagtggggngaaggtttaagttcagagtcataagcaacatcaatggctccttcaactctgacggctcttgcggaagagaaaaccttgcaggcaagcttcgttcgtgatgaagatgagcgtcctaaggttgcttacaaccaattcagtaatgatatccctgtcatctctcttgctggtatcgatgatgttgatggcaagaggggtgagatatgcaagaagattgttgaggcttgtgaggattggggtgtcttccaggttgtggatcatggtgttgatactaaactcgtgtccgaaatgacccgttttgccagagagttttttgctttgcctgctgaagagaagcttcggttcgatatgtctggtggcaagaaaggtggtttcatcgtctccagccaccttcagggagaagcagtgcaagattggcgggagattgtgacatacttttcatacccattgaagagcagggactattcaaggtggcctgataagccagagggttggattgaagttacaaaggagtacagcgagaagttgatgggcctagcttgcaagc

SEQ ID NO: 14926 - DNA, 562 bp, Gossypium hirsutum
  unsure (1)..(562): unsure at all n locations; Clone ID: LIB3829-018-Q6-K6-D3
gcgttcgtctcaagcagccgcggctagaaagggttattgaagtaagaaatttagcaatgtctcctgctaaagttgacagcaagaaaaaggccgatccgaaggctcaagcagtgaaggctgctaaggctgtaaaattgggcgtggcatttaagaagaagtccaagaagatcaggacaaaggttacctttcatcggccaaggactttgaagaaggaccgtaaccctaagtatcctcgcatcagtgcaccaccaagaaataagttggatcaatatcaaattctcaagtatcctttaactactgagtctgcaatgaagaaaatcgaggacaacaacaccttggttttcattgttgacatccgtgctgacaagaagaagattaaagatgctgtgaagaagatgtatgacattcagacaaagaaagtgaatacgttgatcaggcctgatggaaccaagaaggcgtatgttaggntgactcctcttttctctttctngtatgnggcaaacaagattggaattatctaagcatatcaaccaatgtcttccttgctgtgcacctttttttt

SEQ ID NO: 14927 - DNA, 565 bp, Gossypium hirsutum
  Clone ID: LIB3829-018-Q6-K6-D4
cggccgcgtgggctgccagaacctccatagaaggcaacccgccctcctcctcagcctgttgatccttactcaagatatgggcccaaagcagaaataactcacatcttcagggctcctgaaaagcgtccccctaaggagctttctcttgctttcctgggtcttaccttcttgccattacttggattcttgattgggctattacgattgggggtaaatttgaagaactttccttccaataccgtaccggccacgtttgccacactcttccacgtcagtattggagcagttctgtctctctatgtgctcttctggttgaagttggatctattccaaacactgaaactacttggtttcttgggagttatccttgtgttggttggccatagagtcctttcccatttggctgctacatctgccaagcttaaatctgcctgagttgattgaagattaattcctattcctttgcaagcgttgcttgctgcaagattattctcctcttctcttttggttagcagatttttcttccgtcattttttacccaaaattttgttgggcctaaataaaa

SEQ ID NO: 14928 - DNA, 366 bp, Gossypium hirsutum
  Clone ID: LIB3829-018-Q6-K6-D5
ggaatgtcacatgccctctttgcaggaacgctctgctgcccgaaccgatccggcctacttttggtgagcgtgcggagattttcgaattttccatgtacagcgcgtttattgtacagggtttctgaagttgtatgctcatctcacttatgttcggttcatccagattttgttatgtctgctgttttcgattagtggaatcaaaatctgctgacagacaggattactgccttgtaatggctgtagctgttgttgtgtaatatgataatgtcaggtttctgatgttattttaaaacaacaaaatgagatagtacctgctactttgaagaagcaaactctgcccgggggtgggcgtcccatgtgtccttc

SEQ ID NO: 14929 - DNA, 601 bp, Gossypium hirsutum
  Clone ID: LIB3829-018-Q6-K6-D6
gtgttaacgctaaacccatttcttaagtggggcgaaaggtttaagttcagagtcataagcaacatcaatggctccttcaactctgacggctcttgcggaagagaaaaccttgcaggcaagcttcgttcgtgatgaagatgagcgtcctaaggttgcttacaaccaattcagtaatgatatccctgtcatctctcttgctggtatcgatgatgttgatggcaagaggggtgagatatgcaagaagattgttgaggcttgtgaggattggggtgtcttccaggttgtggatcatggtgttgatactaaactcgtgtccgaaatgacccgttttgccagacagttttttgctttgcctgctgaacagaagcttcggttcgatatgtctggtggcaagaaaggtggcttcatcgtctccagccaccttcagggagaagcagtgcatgattggcgggagattgtgacatacttttcatacccattgaagagcacgtactattcaatgtggcctgataagccatagggttggattgaagttacaaaggagtacagcgagaagttgatgggcctatcttgcaagcttcttgaggtgttgtcagaggcc

SEQ ID NO: 14930 - DNA, 160 bp, Gossypium hirsutum
  unsure (1)..(160): unsure at all n locations; Clone ID: LIB3829-018-Q6-K6-D7
cgaatggccgagcccatgtttttctggcttgaaaaanaatctgcatcgggtcgatatatatgcagtgctgtcaataccagtgtgccagaactagcaaagttcctcaacaaaagataccctgacttcaaagtccctaccgatttttggagatttcccctcc

SEQ ID NO: 14931 - DNA, 588 bp, Gossypium hirsutum
  Clone ID: LIB3829-018-Q6-K6-D8
gttttgagggtgacaacatgattgagaggtccaccaacctcgattggtacaagggtccaaccctccttgaggctcttgaccagatcaatgagcccaagagaccctctgacaagcccctccgtctcccacttcaggatgtctacaagatcggtggtattggaactgtcccggtgggtcgtgttgaaaccggtacccttaagcctggaatggttgttacattcggaccttctggattgaccactgaagttaagtctgttgagatgcatcatgaagctcttcaagaggctcttcctggtgacaatgttgggttcaatgtgaagaatgttgctgtcaaggatctcaagcgtggatatgttgcctccaactccaaggatgatcctgccaaggaggcagccaacttcacctcccaagttatcattatgaaccatccaggacagataggaaatggttatgcacctgtcctcgattgccacacctcccacattgctgtgaagtttgcagagctcttgaccaagattgacagacgatctggtaaggagctagagaaggagcctaagttcttgaagaatggtgatgcaggtatgatta

SEQ ID NO: 14932 - DNA, 506 bp, Gossypium hirsutum
  unsure (1)..(506): unsure at all n locations; Clone ID: LIB3829-018-Q6-K6-D9
gcagatttagtggtggagttagagctgcagttttcttcttgtggatcgttatcttgttcttttcccagttaggtttgcattttgctgttcataataataacagtaataaagacgccagtaccagcagtggtagtcatcagtcattcacgtttcatcccccaaggaaagccttgtctttggacactgcttcttttcatgctccctcaagcctatctcagtttactgtgaacgaagatgatccagacactatatatgaagatgatatgagagtagttcatacaggtcctaatcctcttcataactagggaagcttagctttttttctttatttgtattgttattgatattagggtgaatgagagagtattgactttagccttttcagtaatgtttaaatgagggttttatagggcattgcagctttagcaatggtctacacantgatgagaaaaaaggaaagacgacggaaaggctcttgttaatgctcttgtctcttctgtacctgc

SEQ ID NO: 14933 - DNA, 467 bp, Gossypium hirsutum
  unsure (1)..(467): unsure at all n locations; Clone ID: LIB3829-018-Q6-K6-E1
gttttctctacctttccaanatctcttctcacgatggcccaagcagatcagattagcaacagccctgaaatcaaagagccatccccgaaagtcccaaaactcggtcaaaatggagtacatgaagttacccatggtccagcctccctcttgaaagtcaaaaagctttctgaaaaagccgtgttgccgtcaagaggctctcctctcgccgctggctacgatctgtcaagtgcaacggatacaaaggtgccagccagaggaaaagcgttgattcccactgatctaagcattgctatccctgaaggaacatatggtcgcgttgcgccaaggtctggtttggcttggaagcattccatcgacgtangtgctggagtgatagatgctgattacaggggacccctgtgggtgattttgttcaaccattctgattgttgttttggagtgaaagtgggtgacaggtttgcccattt

SEQ ID NO: 14934 - DNA, 377 bp, Gossypium hirsutum
  Clone ID: LIB3829-018-Q6-K6-E10
aaatgttgccaacaacaatttaagtggatggattcctcaagaacttttttcactcctgacttttatatgcgatgggaattcctttgccaatggacctgctcctctgccactaccatatagtccacctccacctggtagatctcgtcataaacataaaattcgaccaggaactcgtggggggggcgattccgatgctcaatcatcagattcagataagggaccatcagctggacaaattgtaggcattgttcttggttctttgttgctacttgtccttgtactacttgctgctgttttctgtgttcatcacaataaactgaaggtgagtggtgcccgagcttcaaagggaagtttttcagctggcctcctatgctggt

SEQ ID NO: 14935 - DNA, 604 bp, Gossypium hirsutum
  Clone ID: LIB3829-018-Q6-K6-E11
ggagagcagtccctaggaacaattaaaaagaaccgaaaaaaaaaacacagattaagacagaagcatggccagccagctcgtaggaacaaagagagcttgtgtcgtgggtggcagcggattcgttgcctcattgctggtcaagttgttgctcgagaagggttacgccgttaacactacagtcagggaccctgacaaccagaagaagatctctcaccttgtaacactacaagagttgggagacttgaagatctttcaggcggatttaactgatgaagggagctttgatgcccctattgctggttgtgaccttgtcttccatgttgcgacacccgttaactttgcttctgaagatccagagaatgacatgatcaaaccagcgactcaaggagtggtgaacgttttgaaagcttgtgccaaagcaaaaacagttaaacgagtcgtcttgacatcatctgccgcagctgtgtctatcaacacactggatgggacagatctcgtcatgacagagaaagactggaccgatatcgagttcttatcatcagcaaagccaccaacttgggggtaccctgcattcaagacgttggctgaaaaggcacttggaaat

SEQ ID NO: 14936 - DNA, 599 bp, Gossypium hirsutum
  unsure (1)..(599): unsure at all n locations; Clone ID: LIB3829-018-Q6-K6-E12
agcaatcatggcaagcaaanaaccgggtcaggagcacagagaagacgaggatgccgcccccgccgaggaagaagacccggagctcaaatcgcccctatcatcaagctcgaggaagtcgccgtcagcaccggcgaggaaaacgaagatccgatactcgatctgaagtcgaagctctaccgatttgataaagaaggcaatcaatggaaagagagaggcgctggtactgtgaagctgttgaagcacaaagagactggaaaagttcgccttgttatgaggcaatctaagactctcaagatctgcgccaatcatttagtgttgccgactatgacggtgcaggagcacgcagggaacgacaaatcgtgcctgtggcacgcttctgactacgctgatggtgaattgaaagatgatctgttctgcattcgttttgcatctgtgaaaaattgcaaaaccttcatgcaaaagttccaagaagttgctgaatcacaaaaaccgaaagaggaaaataaagatgcatctgctgctgctggactgctggagaagttgagcgttgatgaaaagaagaccgaggataaagctggagaggagaaaaaggaaacaga

SEQ ID NO: 14937 - DNA, 449 bp, Gossypium hirsutum
  unsure (1)..(449): unsure at all n locations; Clone ID: LIB3829-018-Q6-K6-E2
catagcggtgcaggnaccttacttgacttaccaggacacgtatctggctattactggtgggtctggcatttttgaaggcgtctccggtcaggttaggctccaccaaatcgtcttcccctttaagattttctacactttctatttgaagggaattggtgaactcccagaagagctgctttgcaagccggttgacccacacccagctgttgaagccgttccggctgctaaggcttgtgagccacatgccaccattgcaaatttcactaattaaatcatctgcaatgtcaatgggatcttagtataaattttgttgtagcagagtttaagattagaatgaattaaagaaatgaatgtgttgtcctttttaaacttttttgtgcaatggatgatttttggcttttagcctttgctctgcaaaaaaacaaaacatataatgataacctgtgtgt

SEQ ID NO: 14938 - DNA, 592 bp, Gossypium hirsutum
  Clone ID: LIB3829-018-Q6-K6-E3
gttttgaagaaaacattgctgacagacgttgtgaactgaagaaaccgtccccgaaaactcacttacagatcaaaaaacgaaaacccatcactcaaacctcgagtttcccttcgaatttctgcaaaaatgcttgctttttctcgacgaaaacaacaacggactttaccaagtctccattgtttgaattcccatcacctgttaaaagaagtccatgtaaaagccccaatgctatttttcttcacatcccagcaagaacagctgctattcttcttgaagctgctttaaggattcaaaagcaatcgaaaactaaaaacaatggtggttcttccgggttattcggttctattttgaagaggataactcatcgtaacaaaagtcggaatagtgaaataagtaacgttgaaggagctgaagtgtcggtgaaagatattctaaggtgggattcgagtgttggtaaaaataatcaaagtggtcggccgagtagcagtgccgtttggtcggaaactaatgaagaaaaatcgatggatttggatttggatacttcttgtagctgcagccaatccgaggatttcgaagagattttcgttaataa

SEQ ID NO: 14939 - DNA, 585 bp, Gossypium hirsutum
  Clone ID: LIB3829-018-Q6-K6-E4
tcggtaaccaaccccaacccgaatccgagcaccgtgaagacgagagtccccgaagtagagatccgattgtatcgacaaggcaagggtccgatcgacgtgttcaagtcgagcttgggtggatgggaccagaaccagcttgaggttcgagacatactcgacaaatacggcttgaaatcgatttacgctttcagtccccagtcgggtcgtggcgtcccaatccgctttcatcccagaaatgggaggtctattcttggatacaaggacggatcggtggttcacattgacggcgagccacaggattcattaatcaaacctgtaaccaaggtcttggtaggagtagcagctattacacttctgataactctggtagcaaaggatactccggaatggatgaagaaactaaagatttcgggcggagatttccctccttggctcctcgcttgtgtagttatcgtgtttacacgcatgaggaagagaacgaagaatttttttaagaagtttggttggtgtttggggatacccttggagtccattcttagcccacatccgtttctcttcatttttaaatcttttggcttaccaaaa

SEQ ID NO: 14940 - DNA, 482 bp, Gossypium hirsutum
  Clone ID: LIB3829-018-Q6-K6-E5
atagcatagcaggttagtccaactccacacccaccaccgttggctgtttttgatcatccgaaaaagaatggtgaccgtggaagaagttcgtaaggctcaacgtgcccaaggccctgccaccgtgttggccatcggcacatcaaccccacctaattgtgttgatcagagcacataccctgactactatttccatatcacaaatagtgagcacaagaccgagttgaaagagaaattcaagcgcatgtgtgaaaaatcgatgatcaagaagcgatacatgtaccttacagaagagattttgaaagagaatcccaatgtatgtgaatacatggctccttcactggatgctaggcaagatatggtggtagttgaggtgccaaagctaggcaaagaagcagccaccaaggccattaatgaatggggccagcccaagtccaagatcacccaccttgtctttttgcccactagtggtgttgacatgcctg

SEQ ID NO: 14941 - DNA, 591 bp, Gossypium hirsutum
  Clone ID: LIB3829-018-Q6-K6-E6
ttttaatttgccacttaatctctctctgtcctttccttttctgttctctttcttcccccctccccctttcacatcaaccctaaccctacctcaccaatcaggatacaacatgaagggaggtaaatccaagtcagatactaagagctccaggctcgccgtgaacaagaaatctagcgccaaagctggaaagaaatcggggaaggcggctaaggatccaaacaagccaaagaggcctgctagtgccttcttcgttttcatggaggagttccgtgagcaatacaagaaggaacacccaaaaaaacaaatctgtcgctgctgtgggcaaagctggtggagaaaaatggaagagcttgtctgatgctgaaaaagcaccttatatagcaaaggcagagaagcgaaaggtcgagtatgaaaagaacatgaaggcctacactaagagacaggctgaggctcccaaagaagaagagtcggagtctgagaagtcggtgtctgaggtgaatgatgaggaggatgaggacgatgaaaaaagcaggggagaggaagaagatgatgactaagaaggaaggaagacttgtggcaggagagatagca

SEQ ID NO: 14942 - DNA, 511 bp, Gossypium hirsutum
  unsure (1)..(511): unsure at all n locations; Clone ID: LIB3829-018-Q6-K6-E7
atcagattaaagctatactggttgtcggcatatgtacagacatatgtgtactggattttgtatgttccactctgtcggctcgaaatcgtaggatgcttacccctcttaaggatgtgattgtctactctggtgcttgtgcaactttcgatcttccagttcatgttgccaaagatatcaatggtgctttggctcatccacaggatcttatgcatcacataggtctatacatcgccaagggaaggggggccaggcttgtatcagaggtctcatttgctgctctataaacgacttgttaataagagatctaagactgctgcaaatgtgtattgtatgtgaagactatagagtacaattaaaagtaattatccccctccaaaaaataaaaataaagttataaattgctgtttttccaggttttattttctaaaattgaaatacttgtcattttttctttttgtgctctgaagtgccatttgcaatatcttcaatgaaacaagaaagttcatatntg

SEQ ID NO: 14943 - DNA, 346 bp, Gossypium hirsutum
  Clone ID: LIB3829-018-Q6-K6-E8
tcgcggacgcgtgggttgcttttctatttgttttctttgtttccggcagaataaagttaggaccttgctgcctctcgttatttcatcttttccccttcccactcacaacatggggcttggccctcatgacttctctccgacagccccgatcctcagtttgctgtgcaccgctgtcactttgggcctccgctagtgattcaccacactgcagcttgttcgattagtgactgaggtcgcttgctccatggtgcttgacggtgtaattatgtactatgttttgcaggatggggtttgaatgtaattatgttagtctttctggtgaatagaaaagttgaaagcatttttc

SEQ ID NO: 14944 - DNA, 595 bp, Gossypium hirsutum
  Clone ID: LIB3829-018-Q6-K6-E9
ttcgcctctttcgttgaaatcagtcggtacaatctgattccactctctgtgacttctctctgcggttgcccatgccgtctcttatccaacaaaaccctaattcccactagaagaacccccaaactcaagcttaactttgtctttcatggatcgaaatcggtcttccgggttcgtcctaccagtatttacgtcaaccggcggttaattacggccgtcgcccgtgctgaacccgaaagtatcgacgaaagcaatgccgaggaggaagttgaccaaggcactgtcttaccaacgacaaaggattctttttctgagttacaacataaatcaagtcagttgagaaaaaggatcgttttcggacttggtattgggatctctgtcggaggtgctgtattagctggaggatgggttttcactgtggctttggctgctgctgttttccttggcgcacgtgagtattttgaattggttaggagccgtggaatcacagcaggaatgacacctcctccacgatatgtctcgcgagtttgctctgttatatgtgcgttcatgcccattctcacattatactttgggaatattgatatttcagtgacat

SEQ ID NO: 14945 - DNA, 607 bp, Gossypium hirsutum
  Clone ID: LIB3829-018-Q6-K6-F10
gcggcggcgggaacggcggcggaagtgaacccctcaaagcagtctccttcgtctaccggaacatcgttttccttcctctctctcccttccgctctccgaataccagttttttctgtttcaaaaaaatttcagatcaacagtgaaatatccaggtttaaattgccaatggcaaaagttagcaaagtgcataagtccgattctcagcataaaagagtgccttatccattgccctctcatcctaagagggctggaaaaggttccagaaagaagagatgttccaaagcttcggagaagaaagattgggaagctgcaaaatgttccgtttgtctggagttcccacacaatgccgttctccttctttgttcctcttacgataagggttgccgcccttacatgtgtgcgactagcaagcggttttccaattgtcttgagcaatacaagaaagcctacactaaagtaacatcagctgactcaatggataattcaagtcttacttcaggtgtggagcagcccactgaaaagatggaagtgccagagcttctatgcccgctctgccgaggacaagttaagggctggacagtggtagaacctgtacggaaatatctaa

SEQ ID NO: 14946 - DNA, 595 bp, Gossypium hirsutum
  Clone ID: LIB3829-018-Q6-K6-F11
tgttgcagcaaaaactagggtgcctatcgttcctataaccttaattggcacaggcggaatcatgcctgcaggaatggagggtgtcgtaaattcaggatctgtgaaagttattattcataaaccgatcaaagaaaatgatcctgaaatattacgccaaatagctagaaacacgattttagatacacttaagcttcgatgctgagaaagtggccactgtgacatcttttggttttatggttcatacttaatcctttattgctgatttgaggaacatggtaggaaggttttataattccaaattagcaccgttttagtaatatgtgatcggttactggctttatttgcatccatttcacacgtaacggacttggagggatctcgtgtttgtggcagatgattttatgcggtcgcaacgctaacagtttaacaatggagttggccaaactacagcttgaagttggcatcaaaatgtttctgttcatatcatgtattgcatttccagatattgtatgggaaagtcccaacacaaaattttgctgtcccttgatagaacttggttaagattatgtgttagtttctcatacgatattgtatg

SEQ ID NO: 14947 - DNA, 609 bp, Gossypium hirsutum
  unsure (1)..(609): unsure at all n locations; Clone ID: LIB3829-018-Q6-K6-F12
gctttctnaagtgagctgcacgttatagatgggattccgcagcttatttttgtccgttcgagctacacaattgagactgttgaagctgagaggatctctgtggatcatgttgcccatctaaagccatctgatggaggttcagcagcaactcaattggctgctcatcttactggtatacatagtggggtgagagatgttgaatagcagaattagggtacttcatcactatcttgttgggatgcaaaaaggtgatattccttgcgaaaattcactattaaggcaagtatcaagtctcctcagaaggttacctgccattgaatcagaaaaatttcaagatgactttctgatggaatacaacgacacattattgattacttatcttgcaatgttcactaactgctcaagcacaatgaatgagctagtcgacaaattcaacactgcttatgataggcatagtcgaagaggtggacggactgctttcatttgaatgtgggtattgtttattagtaagttggatttttgttggggagaatggtgatgctgtttgtgtttgcagtgttttaaagcttcttaaataaggtagtatgatttgaagtactagtatggtat

SEQ ID NO: 14948 - DNA, 581 bp, Gossypium hirsutum
  Clone ID: LIB3829-018-Q6-K6-F2
ggaacatgcccttctcttacccaatcacagagtgatattgattggttagttggatgggttctggctcagcgatcaggttgtcttggcagttcaatagctgtgatgaagaaatcatcaaaattcctcccggtcataggttggtcaatgtggttttctgagtatctgtttttggaacgaagctgggccaaggatgaaaacacgataaaggcaggccttcaacgtttaagggactatccacagccattttggttggcgctttttgtagaaggaactcgctttacacaagcaaagcttgttgcagctcaagaatatgcgacctcacaaggattgcctatacctagaaacgttttgattcctcgtacaaagggttttgtttcagctgtaagtcatatgcgatcatttgtcccagccatttatgatattacagtggctattcccaaaagctcaccttcacctacaatgcttagacttttcaaggggcaatcttctgtggtacacgtacatatcaaacgacacctcatgaaggaactgcctgaaatggatgaggctgttgcacaatggtgtaaagatctgtttgtgga

SEQ ID NO: 14949 - DNA, 592 bp, Gossypium hirsutum
  Clone ID: LIB3829-018-Q6-K6-F3
cgatacccaattactagggtttcggccaagtagccctcctccatccaatccggccattcaaccatcagttcaccattaaaattggtggatgatgcagaggcgccccttatttccctcaaatctaaactcatggcatgttttcactctgaaatccccatttcaaactccgatttcaacgaaggaaacaaggatctcgttggtgcatctaggttcgaccgtacagaggaacgaggggaggcgcgcgtgaaggaggccgtgcggggaaccgctcatgggagcccgaccctttggtactattctggcatattccagaagtttcttggctgctgagtttctttgggttctgttgggtttcggatttggctattagaatcgggtctgggtattgagtggattgcttgggttttaatttaagcccaaaattctgtacatgggttaggattattgggttatttgggctaggtttattgggttaaggattttggatataattgttaggctattaagtttgggttaatcggtttgggtttaatttaggcccagaattttgtaaatggacgttggcctcataaacactttagtttatttattt

SEQ ID NO: 14950 - DNA, 600 bp, Gossypium hirsutum
  Clone ID: LIB3829-018-Q6-K6-F4
tcggatttggtaccatttctcctctagagatcgaaggtctctccctccagacctgccactgcttccgccgtaaatggagatacgatatcttcatgaagggtcgactttgctgcaacgatcttaccttcctcattacaaacaacaaggcctgtcgcagatctggagttctttaagtcgaaggccgcataaaaaaggatgattaaccagagcccacaacagaaactcctgcactgttcatttgtcccttggctgaaaacccagggcacagatagaaaacatggaaactatcttctccttcctgaccgcatctcgagcatcgatcctcagccatcactgtccgcattttcagattgaaaaagtggaaatgtagttccaagctattctccaaattgtaatcttgatttttgagggtaaatgtaaattccatagttttctaaagaaattttttgtatcggtctgtaaataaacactaggatcaattgtagctttctgtaataatttataggcgctccttacggaaaagtcaccagttgcctcccctctccacacttggatgtctttctgaattgactttgacagcggaatctgtagtattttcct

SEQ ID NO: 14951 - DNA, 583 bp, Gossypium hirsutum
  Clone ID: LIB3829-018-Q6-K6-F5
atccttccttgtgttgatccgaggaacaacaaaccatacactcactcaaagcaaacaagtcatcactagtatagtagatgttgtcaatacatatatctactccattgcaaatatagatctttccccagacgacaatcgttactaccatcagtctgggcctactatgcctgctttatgttacccatttgactctcagctccaagatcggcagtgcgggtcttatgaggtgtctatggcaaatgcttcactggtttggcagaactacacgtgcatggtatcagaatctgggctatgcaacaccactggaaggataacgccagacagattcacacagctggtggcagcgattaacgagagttatgctcttgagcactataccccacccttactgtgccttcaaaattgcgattttgtccgggatacatttcaaaatatcacctcgaattactgccatccattggagcgttaccttaaaatggtcaatgcaggattggggttaatctcagtaggagttttgctgtgtctgtttctgtggatattctatgcaaaccgccccgaaggaggaagtgtttgtgaagatact

SEQ ID NO: 14952 - DNA, 602 bp, Gossypium hirsutum
  Clone ID: LIB3829-018-Q6-K6-F6
gcgttcggtcaatcccctatggaatcccgaggaaagatataggtctcaaggaataaaacccgacgcgggtgggcatagtttcatctctgaggctttgggaagcaaccgggacacatggcctctaatgcaatctagagtctcttcatttcctcagtcaaaatccgatggcaacccggtcttactgaatgattaccctcagcattcgtttttcagcgatttcaactcgggagaaactgtgaagcccgagggtcaatctcttcggccgttctttgacgagtggcctaaaaccagggacacctggtcagctcttgaagatgacagatccaaccagacctcattttctacaacacagctatcgatatccattccgatggcatcatctgacttctccacaactggttctcattctccacacggtgagtttcaaactccatagttgatcctccgaaacccacatttgaattacgctgcagatggttgaatgaacagatatttgggatttcctggaaccccgatcggagaaaaggcctggaagtgttctagctactgactagtattgtactctttgatgattttgcttcagcatgaatgtgtgtagtgtc

SEQ ID NO: 14953 - DNA, 590 bp, Gossypium hirsutum
  unsure (1)..(590): unsure at all n locations; Clone ID: LIB3829-018-Q6-K6-F7
gcttcttcanatttcagcgctttgggtttgccaagaatgaggacgcctcatcaccttttcactttagctctcttcttcaccttcatctctgtttctgttgaagcccttaatgttggaatccaggccgctgataccgacatctctgtgagcaaagaatgcagtaggacatgtgagtcagagttctgctcactgcctccatttttgaggtatggcaagtattgcggcctattgtacagtggatgccctggagagaaaccttgcgatggacttgatgcttgctgtatgaagcacgatgactgcgttcaagctatgaacaatgactatctgagtcaaaagtgcagccaaagcttcataaagtgcataaaggatttccagaaaggaggagaaaggagtttcaagggtaacaaatgccaagtggatcaagtcacttgatgtcatctctgttgtcatgaaagctgccctgattgctggaggagtgcttcataaaccttagtctatttacccaacccaacactgtcagacacgacattcttctgcttctgcaatcctaagattgatgatggcatggcatgcctcaattaaatcattca

SEQ ID NO: 14954 - DNA, 586 bp, Gossypium hirsutum
  Clone ID: LIB3829-018-Q6-K6-F8
gcaacacaattcaggaagcgtctgaaagcttggcaagcaaagaacatcctatagatgttccgagaaacgtaactacccaaatgtacataacagcttccatggataaaattgttcacaacttttctgcgtatatggactatactcttctttcaagcttaaacaatataagctgggtgaacccctcaacagatgtgcttcaagcttattacaggaacttgagtggattctataccttggattttctggatgagcctccctattacttcgactttgtcgccgatttgagagatgatagtacgcatccattgaaggggacgaaggtgaaagttttggaatacagtgaagaggttgagatagtgtttcagtcaacaaatctgttgaacgcatcggatgagcattctatgtatatacacgggcataaattttacgtactcggagagggttatgggaatttcaacagtacaagagatacggaaacctataatctagttgatccaccttacctcagcactgcttcactccctgtgaaaggatggctgacgatcagatttaaagctaacaatcctggagtgtgggcaatgcactg

SEQ ID NO: 14955 - DNA, 601 bp, Gossypium hirsutum
  unsure (1)..(601): unsure at all n locations; Clone ID: LIB3829-018-Q6-K6-F9
tcgaagactttacctgtggatggcaaggtgtcccaatggtccatctgtgaaatttttggttaacgctgttcacacnaatggaagaactgaagctcactggaaatcatttgaaaggttcacgtcctttgttgaccttctcaagcaattttgagaaagatgctcattggaagcttctgaaagagatgatcatacagatatttgggacaccaaaggagcacaggaaatctaagccttatcatgatcacgtctttgttttctccattgctgatgaccacatatggttccgcaattatcagatatctgttcctcacaatgaatcagacaaaatggttagagggggacttgataaaatgacccttgttgaggttggtccaagattttgtttgaatcctattaagatattcgccggtagctttggaggtccaacgctatatgagaatcctttctatgtctcaccaaaccagatccgagcattggagaaaaggcagaaagccgggaagtatgctaagaaagtcaaagctaagacaaggcggaaaatgcacgagctatctaatcctttggagcctgatgaatttgcagatatgtggagggaatgatatct

SEQ ID NO: 14956 - DNA, 611 bp, Gossypium hirsutum
  Clone ID: LIB3829-018-Q6-K6-G1
ctccctttcaggccgccgatttcttctgtcctcttctcgttcccttgtcggccaccacttcccctccgctatggatgacgacaattcgaacgcgttgcggagaatgtcgacccgtactcgtaaagttgctcctaaaatggctgcagcactcggcagttctgataatcgatcccaggcagctttggcccgtcttgaagcattggagaacgataacgctgggattgaagcagttgaaatgaacgatgatgatgaagcttctcttgatgaagatgatcaagcatacatgcaaaagagatcgaagggcacaaaacgtaaaacccgacaggcaaaagcacttgaaaatgctaggaaggctcccagatcatttcttgagctcttacatgaggcaaacttagagtccttacctcctcatgttccatcctatttgagggcagcagtgggacctccaagttctacctcccgccggcatttttgcagcgtttgcggctttagtgcaaagtatacatgtgtgacatgtgggatgcgcttttgttcgtgccgatgccaaaatatacataacgatactcgatgcatgaaatattgtgcatgagtggtaatattaggaacccaaa

SEQ ID NO: 14957 - DNA, 545 bp, Gossypium hirsutum
  unsure (1)..(545): unsure at all n locations; Clone ID: LIB3829-018-Q6-K6-G10
cttatgtctcctctagaggtggatggttcatggatgtgtttcatgtcacggatcaacaaggaaaaaagacaccgatggaaaaaccattgattacatagagagggttctaggacctaagggccacactacagatgggatgaaagactgccctggcaaacgtgtcggggtgcactcttttggtgatcacactgccatcgaactcattggaagggacaggcctggtctcttatcagagatctcggctgtccttgccaaccttcacttcaatgttactgttgcgggagtatggacacataatagacgaatagcatgtgtgctctatgtcacatgataataccaccagtgggtctgtggatgatcccaacagactgtctattatggaggagcaccttaagcacatcatgcgtggttgcgaggaccatgacaatgtggctcgtaccagcttctncatgggattcactcatattgatcgccggcttcatcaaatgctgtttgctgatagggattacgaatgtggtggagtgacaactgatggtgactattct

SEQ ID NO: 14958 - DNA, 593 bp, Gossypium hirsutum
  Clone ID: LIB3829-018-Q6-K6-G11
gacaaaaaagagtggtctcgattaatggaatttcaaatcaggaattgtctgaggatgaatgccaacaactgcgccagagcataataaaaagcgggcagatcaagtggtttactgtgagtgagattctggagaaagcaatggcacttcaagcagtaagggtaaatgactgtctggactcagagattttgcgggttaaaaatctttgcaatcaagcaagcaagaagggggacacgaaagagctcagagaatgtgaagaaaaattgcagcttctgaactcacctgatgaacggcaccgtaggctgcatgaaattcctgacatacaccgtgatccaaataggaatctattttctgatgaagcttctggagagttggatgagaagaaaaaaggaatggagctatctgtaaatagtatcgaggcagataaaatatggcactatcaagatccacttgggaaaatccaagggccattcgctatggcaatgttacgcggatggagcagtagtggtcattttcctcctgaattgagagtacggagagtaagtgaaaagcaagaaaactctattcttttaactgacgctttggttgggcagtac

SEQ ID NO: 14959 - DNA, 597 bp, Gossypium hirsutum
  Clone ID: LIB3829-018-Q6-K6-G12
ctgcgatgctttagctgaagaagtgcgagattcacctcggtttcaacgaatgttaacccagcggcagcatcctttagaaatgatttgatacatggggccaataacaatgggatgcaccaattttcatcagggtttaggccagagttcggtggtttagagctagtcgacaacctcaactcaaatgggcaaaagccaaggctacagttatggcttgacgaagctaattctcaagttaacccatttggtatccccagtaatgcaaacgctttcttagcaccaaaatctacaagctttcctgacttgggaatggcaccaatgaacatgtttggatcactgactacacaatggctcggcaagtacccagaagatgcatcatttgcaggtgcaaacctcaacatgtcagcattgcgacatggaccaaaacaagaagaagagaacaagggagatttgtctgaatccataacatctttgtattccaacaatagtctccaacaacaaaactacactcacatgtcagccactgcactcttgcaaaaagcagcccagatgggatctacaagaaacaacccagcaattaataacagtggctttgggtta

SEQ ID NO: 14960 - DNA, 579 bp, Gossypium hirsutum
  Clone ID: LIB3829-018-Q6-K6-G2
tcgcggccgcgtgggttcccgtgaaccaaaaggaaagatgatgaacccccctagcaactccaaaacccccaaaaatttctcgccattcaaacaaacccctcctctccaagacctccagcaagccttctcgaacatccagacccactgctcttctctcttccgacaaactcaaaatcagttaatggacgcttttaactccaccttttctcactttaatccgccttctttttctccaaaagggccggtttttgctcgaattgctgattctagcaagacccagattgctttgagtaaaaaaaacggtgatgccatgccggcagagaaattagaagagagattggctggggttccggtctatgccttgagtaactcagaggaggaattcgtgttggtttcgggtgtttcgacgaaaaaatcacttgggttgttgtgtttcaagaaggaggacgctgaggctcttttggaacagatgaagaatatggatcctggcatgcgaaaaggaggttctaaagtggttgctgttgctcttaacaaggttgtccagctgcaggttgctggtgtggcacttaggctggtacc

SEQ ID NO: 14961 - DNA, 151 bp, Gossypium hirsutum
  Clone ID: LIB3829-018-Q6-K6-G3
cggacgcgtgggcggacgcgtgggtggaggcgcgcgtcctgcacccgtaccagctgtcgttctagcgatccctttagtgagtcgtgttacccttgtcgtccctgctctccttcttgtgtgtttgtttgcgcgcggtttctttttttttttt

SEQ ID NO: 14962 - DNA, 607 bp, Gossypium hirsutum
  Clone ID: LIB3829-018-Q6-K6-G4
gcgttcggaaatatttggccagaaaccgggctggagtagggtaaccgatgatggagtacaaacgcgtgctcatttagaagctcaattggcttcgtctttggctctgaaatccccaaacgaataccgccagagccttctttcctacatacgcttccttgcaagagaagcggatgagtctcgattacgagaggtctgcgaaagttttcttggtccaccaaccggaatggcttccgattccaagaaccctgcttgggatgcatatgtgctcggaatgaaaaagcacaaacttttaagagaagacattcttccagcaatggcatcgaataggaaagtccaacgattacttaacgagttcatggatctcctctccgaatatgcaagtatcgaaaataacttagaccaaagagacccatctccactgaccgtatctcaaccagagattgacccgatggactccaaccctgcaacctgccaaacagatactgttgagccaacaacagataagacggaaaacccgtcccccggtataatagatcaaatggattctattctatcgaatcaagtaaactccggtaccaaatcttccgatcaagtaaatcaagctcca

SEQ ID NO: 14963 - DNA, 596 bp, Gossypium hirsutum
  Clone ID: LIB3829-018-Q6-K6-G5
tcggtgggatcctaacgttgagagggtttatttggaatccggaaaaccattggtccctgattatgccatgtcttttgtcggcggctcatcaagcaaaccatttgctcgtctatggtgggatgaaactgtacccacagtggtcactagggcagaacctcataatcaggcgatattgcatcctgtgcaagaccgagttctctcaattcgcgagaacgcaaggttgcaaggcttccctgattactacaagctttttggccccgtcaaggaaaggtacattcaagttggaaatgctgtagcagtgccagtttcaagggcattagggtatgccctggggttagcttaccaaggtgtagtttcaaatgatgaaccattaacgaaacttcctccaagattccctaacatatctgagaaagcttcttcggattcatctcaagataattcttaaacccccccttttttcttcaatctaattaatattagtcaatggaattgtgtattactttttagattttgaaactctaagagtaattaaaacctagtttaatgttcttcattcgatcccttgttgtacgactacgtgttgtcggtgctaatat

SEQ ID NO: 14964 - DNA, 591 bp, Gossypium hirsutum
  Clone ID: LIB3829-018-Q6-K6-G6
gccaatatctgagtcaaacaatggaggactctggagatagcagcaagaagaagggttggaaggcacaggcttggatctgccacccaataagcatggcaatttgaagagtgcttccagcgatgaaaaccttaagcacattcttcttcgtgtcaaaacctctaaaactcctacggttatcaattacggagcctcatggtgcggtgtttgtagccagattcttcctgcattttgcaagttgagcaaccagttcccaaacttatcattcgtgtatgctgatattgatgaatgtcctgaaacaacgcagcatattcgttacactcctacgtttcatttttatcgagatggtgaaagagtggacgagatgttcggtgctggggaagagcggcttcatgatcgcttgtggttacattcctgaacaaccccatttatgtttatgttagcttgggatgctttcatgtatctaatcaatttatgccaatcttctgtctttcaggctattcacacttgttaaattatatcctttatggatggctgtcattgcacaaaacttttttatagctcaaatttgaatagaatagtagccaagattaa

SEQ ID NO: 14965 - DNA, 602 bp, Gossypium hirsutum
  unsure (1)..(602): unsure at all n locations; Clone ID: LIB3829-018-Q6-K6-G7
tttcgatcttgtttacaaggtttcatcatttagtcaccccttctctagggaagaggagagtggtatgaaagaatatagttttgcacctgttgaggctctttcaggttacctttctgtgtcggtaacctaccgtgcaactctatctgatttcaaccttgagcctttggtgtctttgccaccaaaaattataacagactatgttggcagccctacgacggaccctatgagatcctttccttcatcagagaagggtgctcatgctacatcctttcctttaagaggagcacgacctccatcttcgtctccatttcaacgtccacacagctggtctagtggttttcacagaggattcccttctacaaaaactcaatctcttgcaggatctccacctgcttatcgtacatctcccaagccgtatgatattgcatctacacctactgatttatatggtaatagaattcaaaatcaaagagtgtcaactctacaacaggttactgcttatgatgaatataagtcgtcacccccattctcaccatctgcttctccatcaactccgtcatacttatctggtgctaatcctttgcttactcgtcattgntctg

SEQ ID NO: 14966 - DNA, 600 bp, Gossypium hirsutum
  Clone ID: LIB3829-018-Q6-K6-G8
tcggtttttttttcttacacacacaacaaaattccaataaattcccttaatttctcttagtttttgcttacgaaaatactttatacgtattcaccaatgcatgatctttcgatccaatgtaatttcgacccataaaacacgcttgatttgactcactgagttggagaaaaaattatgatagaagcaatggagagttccgtcgtcaatggcagtggtttcactcagttacaacagagctatggagatagtagtgaagaagagctatcggtgttgccacgtcacactaaagtggttgtcactgggaataaccgtaccaaatcggttcttgttggtcttcaaggtgtggttaagaaagctgttggacttggtggatggcattggctggttcttacaaatggcattgaagtaaagctacaacgaaatgccctcagcgtaatcgaagctcccaccggtaacgaagaagatgatgaccttgagtttgggaacatgcaatggaacggatcagacttggcatcggatgacactcaaaagtcccatagatcaagacataagtcgcataaatcgacggggtcttctcacaaaactacgagcaggtctctt

SEQ ID NO: 14967 - DNA, 261 bp, Gossypium hirsutum
  Clone ID: LIB3829-018-Q6-K6-H1
gtaacggtaggttggctatgttctcagtggtcgggttcttcgttcaggccatcgtgaccggaaagggaccattggagaacttggctgaccaccttgctgacccagtcaacaacaatgcttgggcctatgccaccaactttgtccccggaaagtgaacttagagagtgagaagggatttggcttgtttatgtttttatttgttggtgtgaatttaaatttgttgcacaatcaatgaaagtataatgtgaattttgtgtgctc

SEQ ID NO: 14968 - DNA, 610 bp, Gossypium hirsutum
  unsure (1)..(610): unsure at all n locations; Clone ID: LIB3829-018-Q6-K6-H10
ccaaaccaaaattgncttcactgatccagtggatggaaatggaaatgagaagatggaggttgttccagcaagtcaaggtgaaagtatgatggatgtagaagagattatcagcagcgatagtggaggtgaggaagatgacaatgtgcagaaggatagcaagcctgaagctacgaaaaagggctggttttcctccatgttccagagtatcgctggaaaggcaaatttggagaaggctagacctggaaccggctttgaaggctctgaaggataggcttatgaccaagaatgtggctgaggagatagcagagaagctttgtgaatcagtatctgcaagtcttgaagggaaaaaattggcctcattcacaagggtctcttcaacagtgcaggctgcaatggaagaagcccttgttcgtattttaactcctcggcgctccattgacatactgagggatgtgcatgctgccaaggaacagagaaagccgtatgttgttgtctttgttggagttaatggagttgggaaatcaacaaatctagccaaggtcgcttactggcttctgcagcataatgtcagtgttatgatggctgcttgtgatacattccgatctgttgc

SEQ ID NO: 14969 - DNA, 595 bp, Gossypium hirsutum
  Clone ID: LIB3829-018-Q6-K6-H11
aaacaatcctaaaggtgaaacatgtggtccgacgggaacgtcaccggcggcggcggcgctaacaccgtcggcgtaaccaataagcctttcttttgctaccaatgcaaccgtaccgttaacgtaacgatatcccctccctcttctgatccgacttgtcccatttgcaacgagggtttcctggaagaatacgacaacccaaaccctaatcaaggttccggtttcctaaacccgaatccgaactcaatcccgttccatgaccctttcttgacgttatcggatccgttcgcttccctccttccgctcctttttccgtcctcttcatccacaactacctcatcctctgcttctattgaccctaataaccctagcctatctgggccgacccgctcaggtcgaggcgacccgttcgctttcgatccgtttaccttcatccagaatcatctcaacgatctgcgttcaagcggggcgcagatcgagttcgtgatccagaacaatccgtccgaccagggctttcggcttccggcgaacatcggggattatttcatcggaccgggccttgagcaattgatccagcagctggccgaaaacgacccta

SEQ ID NO: 14970 - DNA, 175 bp, Gossypium hirsutum
  Clone ID: LIB3829-018-Q6-K6-H12
cgggggaacgaagctcattattcgatcagagaacaagccaattcattcattaggcagactcagagcagagctcatatctttctattcgagatccaaaacggaagtcgctacattagcgcctatcaccatgctaccattatcgatcttgcgaaaaagctcagagagaaaataccct

SEQ ID NO: 14971 - DNA, 601 bp, Gossypium hirsutum
  Clone ID: LIB3829-018-Q6-K6-H2
gcgttctgcactccttgcaccttcaaagtaattgcaactaatgcaggtgttgacggagaagttgtagtggagaagactagaaagctcgattggaaaattggctacaatgcaatgtctggaagatatgaagatctaatcaacgcgggagttatagatccttgtcgagtttcaaggtgtgccttacaagagtgctgtctctgttgctggggtagttctaaccactcaagctataatggtagacaaaataaagacacccaagccagttgtccctcttgtcccaggaattcgtccttgaataaaagggaataaaagggagtaaaagaagatagtggtaggttaaagctgaagaagaagccagcaaaagctgtatttgcaatggttgaaaccaagctgtaaactggttggcttggttctcgagaaccaaaatggattttatcatgtgagcctcaaataccatggtatacgagtgcctactgaattgcttccttgtagctgcagtacgttgtatttttcctgcatcccccgcagccagcagctcaatttatttagctgtttgtaaattttatcataaagtaatgtaatagaaacgtcctgaaacgag

SEQ ID NO: 14972 - DNA, 594 bp, Gossypium hirsutum
  Clone ID: LIB3829-018-Q6-K6-H4
aatctctgctagggtctaaggaagatgacagtgcaggtccttcacaagccaatgttccaatggatccacaaggttatccaatttcaatcaaccagcaacacactctaccaaccctgtcagtcccagttccttcagagcagcctcctatagattctagtctaaatgttggaggttatgatgatagtatggcggcaagaatgtcaatgcaatcacaaaatgtgcatcttcatgctcagaatcagttcagtggctcttcattcgctctacaaaatcctttggtcagtggttcacaccaggtccaggttccaggacatgacaatgacccagctcttggtccatgtcaatcgtccatgccaggtttccatgagggcgggacatcacacattcctacttacaagggaatcgatgatttcttctcagaggaggagattaaaatgagaagcaatgaaatgcttgataatgaagacatgcagcatttgcttcgtatctttaacatgggaagccattgccatgctactcctcctcctcctccctttaacgctattgaagatactcatccgtatccctcacatatatgcccaccccatccctggc

SEQ ID NO: 14973 - DNA, 602 bp, Gossypium hirsutum
  Clone ID: LIB3829-018-Q6-K6-H5
tcggaggaactgttaaggctaattccagaagagaatacaggccttggttacatgtgttgttgattagactttatgctcaggagaataatttagagaatatggagaagtttattgacgaggcttttgagctcaaggcctctgtatttactgttcctgtaatgcgttgcattatcagtacttatttccgttacaattcagtggacaaactggcaagttttataaagcgcgcagaatgtgctggatggagaatctgcaggtctttgtatcattgcaaaatggtcatgtatggcttacagatgcgcttggaagaaatggagaatgtccttaatgagatgaataatgtccgcatcaatcacactaaaaagacatttctcatattgtacaaggcatacttaatgtgtggtaaaagacataaggttgagactgtagtgggattgatgtgcaaacgtggctatcaaattccgttggaaacatttctttcataataaatcttttgtgaagcaatgtaccgacagaagttgcaggaaacgtttagccgattagcatttctggttcatcatgatcacagcactgaatggagatttgaaattacccgtaggtac

SEQ ID NO: 14974 - DNA, 334 bp, Gossypium hirsutum
  Clone ID: LIB3829-018-Q6-K6-H6
ggcaatgccatatgaagtggggagacttatcactctatgcaagggactgcgacaatgggagagttgaccctaaggactgtgctggagttatactttgtgctgctgaacgagccactcaagttgctttgcaggctatacaatgtttatgtggtaacggatatgtaaatgagtacacaaccggccgtctgcttttagatgcgaagctgtatgaaatcggagcaaggaacaagtgagataagaagaatggtgattggtcgtgagcttcaaaaggaggagttagagtcaaagctgtagataacaataccaaaaatctgaatgtagcgtacaataataa

SEQ ID NO: 14975 - DNA, 525 bp, Gossypium hirsutum
  Clone ID: LIB3829-018-Q6-K6-H7
cgtctcttaaaaaaaaaaaaaaaaaaaaaaaaagagagaaaaaaaaaaaaaaaaaaaaaaaaaaaaaaaaaaaaaaaaaaaaaaaaaaaaaaaaaaaaaaaaaggggcggccggttcgcgggaaaaagaaaaaaatattcttaaaccgttgggggggaaaaaaaaaatttggttttgagttctaattttggtttttcctttgggaggggccccttccttgcagcttaattttaaggccctcttttgttcccttcctccgtggtttttggcttttgggcccctttggggtttccagcctttcacaaatctttttggaccgatttttttgttccttaaaatcctaacccaaaatttttccggggcgagactagatctttttttaaaggaatcgccttaaccagtttgccttttacggtcatttgcaaaaaaccacttggattttcatttccaaacagcacaatttcgattttaattggaaaaaggaccaaaagggaaggccctaatggaaatgaccttgtttttaaa

SEQ ID NO: 14976 - DNA, 599 bp, Gossypium hirsutum
  Clone ID: LIB3829-018-Q6-K6-H8
aaaaattctcagacctatggggaagagttgtctttattgcaaatgattggcacagtgctcttcttccatgctatttaaaaagcatgtaccagtcaaggggtatctacatgaatgcaaaggttgtattttgcatccacaacatagcctatcagggaagatttgcctttgcagatttcaaacgtctcaatttgcctgaacggttcaagagttcattcgatttcattgatgggtataacaagcccgtcaagggaaggaaaattaattggatgaaggctggaatattggaatcacatagagtcttgactgtaagcccatactatgcccaggagcttgtatctggtgaagacaaaggtgtagaacttgataacatcattcgtaaaactggcatcaccggcattgtgaatggcatggatgttcaagaatggaatcctgcctctgacaaatacatcagtgtcaaatatgatgcaacaactgtaatgaaggcaaagccattgttaaaggaagctcttcaagctgaggtgggattgccttgcgacggagatgttcctttgatcggattcattggtaggctagaagagcagaagggttcagatattttg

SEQ ID NO: 14977 - DNA, 612 bp, Gossypium hirsutum
  unsure (1)..(612): unsure at all n locations; Clone ID: LIB3829-019-Q6-K6-A1
cttatcacccttagccaccaccacaactgctgtcagttcctctgttgctgtgtgctaactcttgggttgttttttctttttccttttgttgaagctttaaaaaaaatggtgacagtggaggaagttcgtaaggcacaacgcgccgaagggccggccaccgtgttggcgatcggtacgtcgactccaccgaattgtgtggatcagagcacgtaccctgattactatttccgtatcacaaatagtgagcacaagactgagctgaaagagaaattcaagcgcatgtgcgaaaaatcaatgatcaaaaagcgttacatgtatctaacagaagagattttgaaagagaaccccaatgtatgtgaatacatggcaccatcactagatgcaagacaagatatggtggtagttgaggtaccaaggctaggcaaagaagccgccaccaaggctattaaggaatggggtcagcccaaatccaagatcacccacctcgtgttttgcaccaccagtggtgtcgacatgcccggtgccgattaccagctcactaagctnttgggccttcgcccgtcggttaagcgcctcatgatgtatcaacaaggttgtttcgctggtggtact

SEQ ID NO: 14978 - DNA, 612 bp, Gossypium hirsutum
  Clone ID: LIB3829-019-Q6-K6-A10
ctcaaatctcttcaatctgggttccttggccggcatctctttaaagcaaagacatgcccatccagttcttctcccatcaggaatattgttgtgaatggttgactttacggccaaaaggttttcggtcagatcccagaccaccagaccagtcgcaaatgtggaactgctactatcgaacgctgcgtcgaaatagaccgccgttcctgccataaggcataactgaaacatcgacattgggcatcgttacctctcttgagaacccagggcagtcatgaaagatatggaggttgtattcttcccaggaacaacatcgggggcacctatcatctgatattattcttttgaatcggagattaacaaagtttggaataaaatcccaggagattctccagataatgattataattttagggggtagctgtaggccccatagtttcttgtagaattctttcatttcggtctgtattaaaaaattcctaagatccaggctagcattatgtaatagtttataagcactacgtaccgagaactcgcctgatagctctccctttcatacaagcatatcctcgtggtcagtctctgagagagggatctctacaaattctgagcaac

SEQ ID NO: 14979 - DNA, 216 bp, Gossypium hirsutum
  Clone ID: LIB3829-019-Q6-K6-A11
ctctcctggttttgaaatcttgtgttgtgcttgcaaacttcttgatgaggatactggttccatgcatttattttacatgaatggcagattaacaaagcctgccttgaatcagagggacaagagtactgtaaaaaggataaaatgtttggaagatgaaactatatcaaagcacacctgaaaggtgtttcaatctaatggtatatcatgttgtggttg

SEQ ID NO: 14980 - DNA, 605 bp, Gossypium hirsutum
  Clone ID: LIB3829-019-Q6-K6-A12
cggacgcgtgggtttcagttcacaaattgagctccacttctttatcatcttcaccttaaaagtgacaaacaaaataacacaatttatgaaacttcaattatctatctaattccgtgcacaaattcaattaaatttaacatttaaagaagaaaaaaagaacacacaagtgcatttactcactctagaaaataagatcttccttggttcatatgtttgtataattacgtgcgctcgatgctgctaacgagttgatcggatggaacttctttctgtagcattgaagttccttggaaaataaccatctggcagcatgattttctatattcactgagctggtcaggtcttaacttcttgaaaccgaatttatctgtccagattgattcaacttcttctgcagctgggagaacgatattttttacattcaagaatgccaacagcttttcaatacaagagaataacagctggaagtattcctttccatggttagcaatgcttgtagcaactaaaggaatttcagcaatttcttgcccaaaaactcgaattattccagctgatacaactaatgatttaattgtcaatacagcacaatacattactacatattc

SEQ ID NO: 14981 - DNA, 608 bp, Gossypium hirsutum
  Clone ID: LIB3829-019-Q6-K6-A2
tctccggcggcggtgagagcaagagtttgcagaagagaagagaaagagtgagaaggccatgaacgcccccgaccgttacgagagattcgtcgtccccgaggggaccaaaaaggtttcttacgagagagacaccaaaataataaatgcggccaccttcacaatcgagagagaagaccacaccatcggcaacatcctccgaatgcaattgcatggagatgagaacgttttgtttgctggctacaagcttcctcaccctctgcagtacaaaatccttgttaggatccacacaaccagtcagtcttctccaatgcaagcatataatcaggctataaacgatctggataaggaacttgatcatctgaagagtgcatttgaggttgaggtagaaaagcattcaagggacttctaatgtgtgtttgaggcgctcagttaaccaggggttttgtgttatgactttgaaaggaaaaacaaccaaataactttgagacatctgcaatgcatgctattcaggcttttgtaatgacactattttgaaatctgtctcaaagttgttcaagaaacaatccttctgctttctctattatgttttcctaaccaagctgactgat

SEQ ID NO: 14982 - DNA, 598 bp, Gossypium hirsutum
  Clone ID: LIB3829-019-Q6-K6-A3
tcggagaaagtctgcacacattgctctctaatagccgtcattcatctaaaacatccaccgactgtggcgcactaactcaaatctccacacggtgctcaggtcttaatgccctcattgacttcctcaccggccaaacttacatctgtggagataagctgcctaaggatgacataaagtttatgctgctgtttagaaaaaccctggaggttcatttcccaatgtgagccaatggtataattgtgtgtcttcccatctcgcttctagcttccctgggaaagctgttggcgtttcacttggtggcaaagctgatccagctcaatctgctgaagctaagtctcctgctgcggacgatgacgatgatgacttggatctgtttggcgatgaaacggaggaggataagaaggcagcagaggaaagagaagcagctaaaaagtctgctaagaagaaagagagtggaaaatcttcagtactgatgtattttataccatgggatgacgagaccgacatgaagaagttggaagaagccgttcgatctgttgaaatgcctggacttttatggggagcatcaaaattggttgcggtcggatatgggattaag

SEQ ID NO: 14983 - DNA, 600 bp, Gossypium hirsutum
  unsure (1)..(600): unsure at all n locations; Clone ID: LIB3829-019-Q6-K6-A4
atcgctttgtctcttttctggtctcacctaaattaaaatataattccataacatgaccaatcacaactactggatggttccttccttttgattttctttcttttacaactttccatctggacatagcaaaaaaacagagagatctatagtttcactgaacttgcagcagatggcatcatcatcatcggaaaacttggccaacattgaatcgtgggcgtttcgtcccagctttgctgattcttggctctccgaagccgaagctcttaccagggcactccaagactcctctacttccttctctaactctgattcgcattctctttccccgctcttcggccttgtcaactctaaccccttaccgtcgcctactcctacccccagcgggtcaaacgtttcaggctctgaccctgaaaccactgttaaacgtcagcggacactactcaagccccttcccactggaaaagtctccaagtccaaacgcaagtcccgtgcctncaagttctctcaaaccactttcataaaggcggatcccgccaatttcaggcagatggtgcaacaagtgactggagtccgcttttgtaacgcgcagatgtctttgag

SEQ ID NO: 14984 - DNA, 481 bp, Gossypium hirsutum
  unsure (1)..(481): unsure at all n locations; Clone ID: LIB3829-019-Q6-K6-A5
tcgcggacgcgtggggttttgccaaagaggtggagagtgcaagggcatcagttgagaatggaaatgctgcaatccctaacaagatcaaggaatgtagatccttcccgctgtacaaatttgtgagggaagagcttggaactgggctgctaactggagaaaacgttatgtcacctggtgaggagtttgacaaggttttcacagctatgtgccaagggaagatcattgatccaatgctggaatgtctcgaggaatggaatggtgcccctcttccaatctgctagtttgctttattttttatagttgagatgtgtaatccaaatctttcgcatttgttgttgtaatttccttgtaaaacaagttacttaactaaatgaatccattttcacannnnaaaaaaaaaaaaaaaaaaaaaaaaaaaaaaaaaaaaaaaaaaanaannaaaaaaaaaaaaaaaaanaaaaaaaaaaaaaaaaanaaangg

SEQ ID NO: 14985 - DNA, 602 bp, Gossypium hirsutum
  unsure (1)..(602): unsure at all n locations; Clone ID: LIB3829-019-Q6-K6-A6
tctggaanagtgaggcagcagaagtgttcagatctccggcgagatccgggtcaaggaaccaggttgtgggtaggtccccgacccgaaaaattgaccaatcgcctggcagaagaaatggggttgtgaatggggggtcagcatcagtgaggttggttcatagcagggaacccacagtgagacgtgggtcaagacccgacccgacaaggaaggatccgggtgagagttcaggaaggaggtcaaggtcacctgctgtgaatagatctgtaatgggtcggagcccgtctggaagaaggaccaatcaatcccctggtagggccagacttgatccgggagagacgggtaatagcaaaaaagtggagcagcagcatggtgcaactactacaaccaccatggaaggaaaatggccaagtagcaataacaatgcagctacatctagtgctccaaatgaatcacttgaaaatcctcttgtttcccttgaatgtttcatctttctctagagatgaacgaagaagtgtatcttaagttcaatcaccttgtctaattattgtttgtttgtttaagattgtgaatattgattgaacattgaagtcagaggtcgttcg

SEQ ID NO: 14986 - DNA, 595 bp, Gossypium hirsutum
  unsure (1)..(595): unsure at all n locations; Clone ID: LIB3829-019-Q6-K6-A7
tttctgtttaaatccaaaatgtattctctttagtttacctatgaaatgttgttcgatgatatggcttttgcagattgggccctcctttcctgggcaccaacctgttatattcaacccacaagtggcaccaatacaatcaccgcaagcatattttcatccaaatggacctcagtatgggcagcagatggtacttgggcaacggcaagtggtgtattgccaacctgaaatgcaatacaaaggacgggattattaactaataagtgtgtcgacatccttctccgaagcttgcttgctattctcgcaaagagtaaaaactttttgggaggcttcttggatcaattttttctttcacaaaacaaagcctagtcctaccggtccaagaaagaacctatatatatataggggatggggatgatgtttactggttttgtgggggataattttataaaccctcatgactctttggactttctagcttttgttaactaacctccacctttgtctgattggatagttntttaatctttgatagtactggaattgtatcaattttgtggtgcaaagatagtgttgcgttctactcctatgtaccttt

SEQ ID NO: 14987 - DNA, 608 bp, Gossypium hirsutum
  Clone ID: LIB3829-019-Q6-K6-A8
cgacaggctgctgataatgaagatgctggtgggcactataatttaggagtaatgtaccttaaagggatcggagtgaagagggatgtgaagattgcttgtaagtgttttattgtggcagccaatgcaggtcaaccaaaggcgttttatcagttggctaagatgtttcgtactggtgttgggcttaaaaagaatcttcctatggctactgcattatacaagctagttgccgaacggggaccatggagttccctctctagatgggcacttgaatcatacctaaaaggtgacatgggcaaagcattcctcttgtattctaggatggctgagctaggttacgagatagcacagagtaatgctgcatggatccttgacaagtatggtgagcgcagcatgtgcatgggtgaatctggggtttgcacagatgcagaaaggcatcaacgtgctcattctttgtggtggcaagcttctgagcagggtaacgaacatgcagcattacttattggggatgcatattactatggcagaggaactgtgagggattatgagcgtgcagctgaagcttacatacatgcaaaatcccaatcgaatgctcaagctatgttcaacct

SEQ ID NO: 14988 - DNA, 606 bp, Gossypium hirsutum
  unsure (1)..(606): unsure at all n locations; Clone ID: LIB3829-019-Q6-K6-B1
gnaaaaaaaaaaaaaaacaagtgagcagataaattgaagacttttatttctgttaacatccattatgagtactgctggtcaagtcatccgttgcaaagctgcggtagcatgggagtcggggaagccactgtcaatagaggaagtggaagtggcaccaccgcagaaggatgaagtccgtattaagatactcttcacttctttatgtcacaccgatgtctacttctgggatgctaagggacaaaaccctctgtttcctcgcatactaggtcatgaagctggagggattgtggagagtgtaggtgagggggtgactgatctaaagccaggtgatcatgttctccccatcttcacgggggaatgcaaggagtgtccccattgcttgtcagaagaaagtaacatgtgtgatctcctccgaatcaacactgataggggtgaaatgattaatgatggaaaatccaggttttccatcaatgggaagcctatctaccacttcctaggcacctctactttcagtgaatacactgttgtccatgtcggccaggttgccaagatcaatccggaggctccgcttgataaagtttgtgttctaagctgcggaatgtccac

SEQ ID NO: 14989 - DNA, 617 bp, Gossypium hirsutum
  Clone ID: LIB3829-019-Q6-K6-B10
ccccgcgtccggagatttcgaagaaaaacagaaaagaggcggaggaacatagatgccaagcgccggaaggtcaccgtctttgtgttaataactgtggtttcttaggaagtccggcgacgatgaatctttgttctaaatgttacagagatttccgacttaaagaacaacaacaagcttcttcggctaaatcgtctatctctacctctccttcatcttcgtcaacggcagtcgaatctgtttctcaggtacctctcctgactctccctgaagtcaaaggagttccgctggttgtttcggctgtcgcgatctctccggtggcggaacagaaaccacaacagcaacagcaacagcaacagcaacaacaacaacaacaacagcaaccgactcggtgcactgtttgcaagaaacgggtcgggttgaccggattcaagtgcaagtgcgggattacgttttgcgggtcacacaggtacccggaaaatcatggatgcacgttcgatttcaagaagattgggcgagagaagattgcacgtgccaatcccgtggtcaaagcagagaagatcgtgaggatttgagaagaagaagatggaaagccgattgaccctttgacttttaatgag

SEQ ID NO: 14990 - DNA, 597 bp, Gossypium hirsutum
  Clone ID: LIB3829-019-Q6-K6-B11
aaaagattaactcaggattgcctaaggaagctgtttgaacatcatggaaagatcttgaaagttgtagttccacctgcgaaagttggaaaggagaacagcagatatggttttgtgcattttgcggagaggtcaagtgccatgaaagcattgaagaacactgaaaaatatgagattggtggtcacgtattggagtgctctcttgcaaaaccacaagcggatcagaagtctggagcatctggctcccagaagtcatctctagattcaagcttcccacctcttctcggatatggtttagttgggggagcatatggtggtcttggggcaggatttggtcctgctggctttggacagccattgatctacggtcaaggtccaacccctgcaggaatggcaatgatgccaatgcttttacctgatggaaggattggatatgtcttgcaacagcctggagtgcaaccgcacacccctccaccacagccccatagcagccgaggtggtgctagtggtagcagttcgagtggtggaaggcggagcagcaatgacagtagccgaggacggcgtaggtataatccatattagtttagttcccaatttcat

SEQ ID NO: 14991 - DNA, 616 bp, Gossypium hirsutum
  unsure (1)..(616): unsure at all n locations; Clone ID: LIB3829-019-Q6-K6-B12
aaaacactggcctngacaagctttcatgatgacattcaatcattccggccatccctgttttctgatccaagtcattccacaagttcacaatgttccatggcaaagtattatgggggatgggcaacacctagtatatacttcttggagtttgctggggttgtgaagtttggcaatatcggtatcgttggactttccggaatttacaatattgttgatatttaatctgatccgggaccttatgaggttcaatactatgaagattggctggcaataacacggaaattgaactgtctttcctttgaccttccgacgtggaaactttgggagaacatagcttgacatgcaaggttgtcgtcagtgggttaagaacaggatggaagacagaggagccaaaccttgtgaattttttcaaacagctccacctcacaaaccctctgattcagtttcaaacgctactttttctggttctctccgtaatcctcagactctatctttcttgaaattgctagatcttccttatgttcttgataatgcatcggactccagggatactcctgcttcattgcctcagaagggtcttgaaggaggcctctaggctttatgctgcaagttgggc

SEQ ID NO: 14992 - DNA, 585 bp, Gossypium hirsutum
  Clone ID: LIB3829-019-Q6-K6-B2
ccggcaacgcttattttcctccataaagagcaagaaaaaaggcagaaaccgcaaataaaaacgcgaagaaggcgaatctattggatcacggctccatcaaacacatcctcgatgaatccgtcactgagattgttaagagtcgcggatatgtagaagatgtgaggatgagcaatatcagattattgcttggaactattattattgtaatcgctcttgttgctcaattttacaaaaagaagttccccgaaaaccgtgatttcctcatcggttgcatcgtattatatatagtttttaatggagtactccagctggtcatatacactaaggaaaagaatgcaattctctttacttatcctcctgctggatccgtaaccagcactggtttggtggtctcttcaaagttaccaagattctctgatctttatacacttacgatagcaagtgcagatcccaagtcgatatctgcagggaaaccggttgagttgaccaaaagtgttactcaatggttcactaaggacggagtattggttgagggcctattctggaaagatgttgaaacactaataaatgattatgcgacagaac

SEQ ID NO: 14993 - DNA, 166 bp, Gossypium hirsutum
  unsure (1)..(166): unsure at all n locations; Clone ID: LIB3829-019-Q6-K6-B3
tcgctggtggccaatggtgatttcgagacgccaccgtccggcggcttcccaagcgaggcaatatccgatggacccaatgagatccccagctggagcacgaaggatacggtgaagcttgtgtccgccggtgaaaaagtgagcgngcgggnnatgcttttactcatcg

SEQ ID NO: 14994 - DNA, 616 bp, Gossypium hirsutum
  unsure (1)..(616): unsure at all n locations; Clone ID: LIB3829-019-Q6-K6-B4
attttaatcttactgagtgcatctgttgcagttaggtgcaggngaaaagagcgatggcggcagttcccggacagttgatttgggaggtagtgaagaagaacaattgctttttggtgaggcagtttggaagaggaactgctagccttcagttcagcaaagaacccaacaatctctacaacctccactcctacaaacactctgggttggcaaacaagaaaacagtcaccattcaaagtgggggcaaagaccagtctgtgctgctagcaaccaccaaggctaagaagcagaacaagccttcggccttgcttcacaagtccctcatgaaaaaggagttccccaggatggccaaggcggtcaaaaaccaggtgacagacaactactacaggccagatttaacaaaagcagcccttgcaaggttgagtgctgtgcacaggagtctaaaggtagccaagtctggtgtcaagaagaggaacaggcaagccttgaaggttcgtggcaggaagtgagctaggcctttcaggttgtatgagctctgctattttcattgccccagacattnttttaccccttttttgaatttgtcttatttttcatggtttgaactgagttgttgaat

SEQ ID NO: 14995 - DNA, 592 bp, Gossypium hirsutum
  Clone ID: LIB3829-019-Q6-K6-B5
atttccaagctttgcatctttcagtaatacctgattattttggttctttcattgatgcagttgtcattatgaagtttgcattgatgcactggttatgtcatttcttgatttctccattgaaatcctcaaaattttttcatgttcagtttttttgttttttgacattgtaccctgttgttgatacgcagatactggatgatacttttgcgtcacagatgcagcagctcgttggcaatgcactcccggaaaaagaccttgagccacctaggtcaataatggaggtgcggtcgatgctgtgtaaggatgcacataatagtaatgacaactcattcttttactaagcacagtttttgggtagagagagatgaatgagtttggtgatttacgcacgttatacatggaaagcctcgagatatagaaaaccacccaacaaaagcaaaaaacatggagatatagaagttgccacacagatgatctctgatctgaatagccttataaaagattagatgattgaatttggtcatcttgttatttgtatatgtaaaatatgatacaattttgtggctattaactagctcttcttcaagttttg

SEQ ID NO: 14996 - DNA, 606 bp, Gossypium hirsutum
  Clone ID: LIB3829-019-Q6-K6-B6
actctctctcatggcttccgagcagtacggtgccgtttttgaggaatctcaggacgacgacgaggaaccctcttcctccggtaacgacgacgtgctcaacggtaacgacgaagaggacgaggagttgttagaagaagaagaggaagaagattttaattccccctctttactacctcaaccgattgccgcagtcgtaccctccgcctcaatccccgccgttcctcttgccgttccttcatccaccgtcgtgaccgtcgcttctgttcctctcaggggttcgactcccgactctaaacgccaacggattgattccgccgtctccgagaaaaaacctcctccgccgcaacaattcgacgaatcgcggcggttatttcaacgtttatggactgatgaagacgagatcgagcttctcaaaggatttctcgattacacgacttcgaaaaccaactctaattcttctcaccatcaccatcacgatacggcgttgttttacgatctaatcaaatcgaaactccagctcgatttcaacaagaatcagttagtcgagaagcttcgaagattgaagaagaaatataggaacgtgatgaataagatcaattcgggtac

SEQ ID NO: 14997 - DNA, 609 bp, Gossypium hirsutum
  Clone ID: LIB3829-019-Q6-K6-B7
ctttttctttgttggaactcaatagtattgatttctttcatggcgaaaggccggcgattgtccaccagcagaagcgaacggtacctcgggagttacggttacggtcacaaccaaggggaaaccgtcacggacgaaacggaactcggcgaggatgatgtctggtccatggttgataccgtctcagaccgacacgaccagggtgacgacaatccacggagcgagtggactacacgcgtcgagcatgagagtaatgggaatgggaacctgggccgccgccgaatccctcgagatgagcgccacgtgggcgggttgtctttggctttcgaggattcttcttcgagcaagcctaggatcgtgcaccagtttcgcggccacgacaaggtggcagccgctgcttcgccacgtggacacaagatggccacatcagcgcccgtgaacgtgcctgactggagtaagatttacagagtggactcggtggagtctatacatgactcggatgatggtgagtcggaggagatgatgccgccgcatgagtacttagcacgtgagtacgctcggagtaagaaatctggtggggcgtcggtgtttgaaggcgttggtcgcacgctc

SEQ ID NO: 14998 - DNA, 593 bp, Gossypium hirsutum
  unsure (1)..(593): unsure at all n locations; Clone ID: LIB3829-019-Q6-K6-B8
ctttngataccntcgacgcttctttatccctcacatattgagcttgagtcactaaatggcatctctttttcttgtttcagggatctggtcttcaagaagttgtactgtagattaattgaggctgcattaactttgatcaatcaggagcgtgagggacaacagattgactgcgtcctgctgaagaatggcttggatatctttgtggaaattagtgactacaaaggggttaactattatgaagattttgagcggatcatgcttacagaaatctctggttactattctcgattagcttcagagtggcttctgcatgactcatcagctgaatatgttcaaaaggttttctggtgcttgaatcgggagaagcaaagagctcgacagtacctacatcctgacacagaagttaagatagtgcaggtatagtcaatgattttaaactggagaattcctttttgcgcttttactgggttatatatcaaagtgtgcttccaaatgaaacaattgatgaacataaggcagttgtacgggagtttctggctgtgttcttggtatcaatataaactgcttgcttgagcttgtttaacagtggtatc

SEQ ID NO: 14999 - DNA, 553 bp, Gossypium hirsutum
  unsure (1)..(553): unsure at all n locations; Clone ID: LIB3829-019-Q6-K6-B9
gnnaaaattgaaaaatctacaaccatgagttcagccgccgtagcagcagccaaaggaggtcggggccgaggccgaggtaagccaacggccaaagccgtttccaggtctagcaaagctggtctccagttccccgttggccgcgtcgctcgtttcctcaagaaaggacggtactctgagcgcgttggatctggctctcctgtctacctctccgccgtcctcgagtatcttgccgctgaggttttggaattggctggaaatgccgcaagagataacaagaagaacagaatcatcccgaggcatattcaattggcagtgaggaacgacgaagaattgagcaggctgatgggaggtgtgacgattgcgaacggaggtgttttgcctaatatcaatcaaagtctattgtcacggaaggccgggaaaggtaaagtagagaccggttccgcttctcaggcattttaggtaattttgtgtaacatagtatgtaatggaattacgttcctgttattgcaaatatcattcctagtaatgaaatcgttgaattgagttttgttgt

SEQ ID NO: 15000 - DNA, 571 bp, Gossypium hirsutum
  Clone ID: LIB3829-019-Q6-K6-C1
aatctgctatctcttcgtttgctgctgtgataaaaaccataatcatccatcaagaggaagagatgaaactaaaagaaagtgtgaggaaacccggaaggaatttctgcgaaagagtcaggctttcgaggaatggtatcataagtataggcaacggagatctggatcagatgagatggatgctgaaagaggggaagatgcaaacgcaaaggatcctgtatcggagaggcagtttgtggttgagagcttgaaaaagaggttggaagaggaagtcgaagctcacgaaaagcattgcattcaagtgagagagaaatctttgggaagccttaaaatccgactgcctgagctattccgggctatgtcggactattctcatgcctgctctgatgcttatgagaagttaaggactgttatccagtcacaaaaaccaaatactgctccctcaaaatagaatcagctctgttttgctagtaatttcctattaacttatatcatctcagttaactgcagctttaggcaatgcaatagagcaacgtgtaatttaatatctatgtgcaaaagaacatgtgctatg

SEQ ID NO: 15001 - DNA, 607 bp, Gossypium hirsutum
  unsure (1)..(607): unsure at all n locations; Clone ID: LIB3829-019-Q6-K6-C10
ccccgcgtccgggccaatgtggcattngaaaattaatgtcaaggttgggggaagaaatactgttcttgttgatgcaatatcacgaaggatacctcttgtcagtgaccgtccgactataatttttggtgctgatgttacccatcctcaccctggggaggattcaagcccttctattgcagctgttgttgcctctcaagattggccagaggttacaaagtatgctggcctggtttgtgctcaagctcatcgacaggagctcatccaagatttattcaagacatggcaggatcctgcaagggggactgtttctggtggcatgattaaggagctcttaatatctttccgacgaatcactggacagaagccacagcgcattatattctacagagatggtgtcagcgaaggccagttctatcaagttctattatatgaacttgatgctattcgtaaggcatgtgcctcattggagccaaattatcagcctcctgttacatttgttgtggtgcaaaaaaggcatcatacaaagttgtttgctaacaatcataatgatcgccgttctgtagacaggagtgggaatattttgcctcgcactgtggtggactccaaa

SEQ ID NO: 15002 - DNA, 594 bp, Gossypium hirsutum
  unsure (1)..(594): unsure at all n locations; Clone ID: LIB3829-019-Q6-K6-C11
cggacgcgtggngaaaatatcactttttggtacccaaagctcgatttttgctatttttgccaattaaaccctaaaattctttggttccaacaatgatccgattcgttttgttgcaaaacaggcaaggcaagactcgtttagccaaatactatgttccccttgaagattctgagaaacacaaggtcgaatacgaggttcatcgattggtggttaatagagatccaaaatttaccaatttcgttgagtttcgtacgcataaggtaatttacaggcggtatgccggattgttcttctccttgtgtgttgacataaccgataacgagttggcatacttggaatgcatccatttatttgtggagatattggatcatttcttcagcaatgtttgtgagcttgacttggttttcaattttcacaaggtctatctgatactcgatgaattcattcttgctggagagcttcaagaaacaagcaaaaaggctataatagagagaatgggagagctggagaagctagagtaaagatgattctgcatgaaacagagattagtgcaatttgtgttgaattttctccatttgttgcttttctttttct

SEQ ID NO: 15003 - DNA, 608 bp, Gossypium hirsutum
  Clone ID: LIB3829-019-Q6-K6-C12
cacactactccacaccaaacaccccctctctctttcgctctctatctcaacgtattctccaccagatctccgggagtaatcccataaagatgcgtgtttttccagcccttcctttggtatataggctttagacctgttataaaatccctcagccaacaacttcgatattacccatatgctcttttctttttgttgattcgattttttttctctcttctttggggtttctggcttctcttcctttcaggaaacctaataaggaaaacagtgtgcgtgtgtttttggtagagatacagcgtctgctgggatcttgtttggagagagaaaatggagaatgaagtagaaagagagagtgggtcgatgatctttagcgatgaggagttgatagaggtgagtggattgaagaaaggaagagattttatagaagtcacatgtgggtgtaccagtcataggtatggtgacgctgttggcaagcttagggttttctctaatggtgaccttgaaatcacctgtgaatgcacccctggttgcaatgaagacaagttgactcctgctgcatttgagaagcattctggaagagagacggccagaaagtggaagaataatgt

SEQ ID NO: 15004 - DNA, 595 bp, Gossypium hirsutum
  Clone ID: LIB3829-019-Q6-K6-C3
gcaaaagagccttggctcttgatagagctgaaatgggaggaatgcagctaacaattcagccttacaaatccactcgagccaataaagtgactggttttgccccgaagatggtggagggatacaacagaatatatgttggaaatttatcttgggatataactgaggatgatttgaagaggtttttctcagattgcaacatatcatctatacgctttggcacgaacaaggaaacaggggaattccgaggctatgctcatgtggatttctctgatagtgtctcagtagccatggcattgaaattggaccaagaaattgtgtgtggtagacctgtcaagataagttgtgcagttcctaagaatggagtgaaaactcaatcaacgtctgatcctacaagtaatgaagtccgtaaaaaggatgaaggagctttaagtgtcgaagcacctgtgagtgttgaggcacctacggttaatgaagttgatgatggtggctcaagcgttaccagtggtaagttgaggagaaggacgtgctatgagtgtggacaaaagggccatatttcttctgcttgcccaaaaggatctgtgagtgtcgaagcacc

SEQ ID NO: 15005 - DNA, 610 bp, Gossypium hirsutum
  Clone ID: LIB3829-019-Q6-K6-C4
gaagccatggctcctcttctgttagaagtcatctgtggtttgaaggtgttgactggaaagggatcagagatcggacttgtcctgttccacaagagttagcttctcgtgtagctcaacatttggaaatacattctgaggattgccctgttgctgttgcttccccacctcaggatatagcagaactcaatgttccggagtggcttgatgattggtagaagaacgatttatatgcatttccatcctttttgccgacagtttccaagtggagttctattccttgtggcgagactgactaccagtgcgtcagaaactaggcagagatttcattgcagtaattcaagtataaagttgccggccttagattgcttataattctgtgattcctttttttcaatgccatgaattcagagtagcattggaagaatatctcagctaggtgattgttctctgtttccaagttggccatataaccaattcagtggatagctccattatcaggcttttattttaaaatctccaatttctttttttacatatttcccacttttttaaataggtaaatatgtaaatgagggtttcttgtaaatcaagctatctacattggtagcac

SEQ ID NO: 15006 - DNA, 600 bp, Gossypium hirsutum
  Clone ID: LIB3829-019-Q6-K6-C5
ctctctctctcttttaagataatcaaattctctagagagaaaagaaaaaaaaaatggggcaccattcttgttgcaacaagcagaaggtgaagagaggactatggtcaccagaggaagatgagaaactgatcaactatattacaacctatggccatggttgctggagttcagtccctaaacttgcaggcctgcaaagatgtggaaagagctgcagattaagatggataaattacttaagacctgatttgaaacgtgggagtttctcaccacaagaagcagctctcatcattgaactccatagtattctaggcaacagatgggcacagatagcgaagcatctacctggaaggactgataatgaagtgaagaacttttggaattcaagtatcaagaagaagctaatctcccatgatcatgtcccagctttggcttctttcgctgatgttcatagctcaaaccatacggaggaagctggtttcatctctctaaatgcaaaccctaatttgatcctcactgctcaacaagaccagctttatctttcccccacagcacctgttctacaaagtttcggtcaccatgcagatttggttcaccatcatt

SEQ ID NO: 15007 - DNA, 603 bp, Gossypium hirsutum
  Clone ID: LIB3829-019-Q6-K6-C6
cgatcattgacatggatgccgatgtcataaccattgagaactcacgttcagatgagaagctcctgtcagtcttccgtgaaggagtgaagtacggtgctggaattggacccggtgtctatgacatccactctcccagaataccatcaaccgaagagattgctgacagaattaacaagatgcttgccgtgctcgagaccaacatcttgtgggttaaccctgactgtgggctcaagactcgcaagtacgctgaggtgaaaccagccctgagcaacatggttgctgctgccaagctgctccgcacccaactcgccagcgccaagtgataggctcccgagatattggaaatccgaatcccataccattccagagagattaaaaagaaaaatggcaaagaagtttcttctatcttatcatttgaataactctgttgttgatgaaatatttgttacatgcccttggcgtccctttgatttccttatttttgggtgttcttttctctaagtatcatgtactttcttgggaatatcacatatatgctgtcttcagtttcttagtatcttaataggaatgagagtgtcatcaatggttctgcattgacaaaaa

SEQ ID NO: 15008 - DNA, 605 bp, Gossypium hirsutum
  Clone ID: LIB3829-019-Q6-K6-C7
gccgagtcgaagacgaaaccctaaatccaagccccctcccccttcaccaccggcagcagaaatgaagtacaacccacgtgtctcctcctctcgccgtaagagccgcaaggcccatttcacggcaccttcgtccgtccgccgtgttttgatgagcgctccactctcgaccgatctgaggtccaaatacaacgtccggtccatgcctgttcgcaaggacgacgaggtccaagtcgttcgcggtacctacaaaggccgcgaagggaaagtcgtgcaagtgtaccgacgcaaatgggtgatccacattgagcgtatcacgcgggagaaagtgaacgggtcgaccgtcaacgtcggtatcaacccatcgaaggtcgtcatcaccaagctgagactcgacaaagatcggaagtcgttgctggatcgtaaggctaaaggacgcgctgcggctgataaggataagggtactaagttttcggctgaggatatcatgcagagtgtcgattaaggttatctcatgcagagtgtcgattaaggttatccccttttttttaatattaatctaaatgttttttggtatgttatcaattagggattttgctgcttttgag

SEQ ID NO: 15009 - DNA, 596 bp, Gossypium hirsutum
  unsure (1)..(596): unsure at all n locations; Clone ID: LIB3829-019-Q6-K6-C8
ctttttagaatttttttagtttctatcatgatatcagtcgctcggtgatccttgggcatggctatcacgcattctcctgattctgactctgttgagccaagtggctcggtgttcaccggtggtcggatcatcacctcctttcctcgacatgatgttgtcaagcttgacgaggttacgtttatttagtggcaacagcaggtacgctttatccttgctagctatgttggctgctccagcgaggtttgttcaagcctccgatggcactcttgttgccaatccgactgcatcgatcttcactcaacaagataatcttctcacctcgtggttgttgtctacgattagttcgtcgtttttatcctcctttacggacgtccgatttgcatgtgatgtatgaatgatggcaagtagtttgtttgcggccgacactagcgcaaagcagtctcaacttcaccatgaactccattctctcaagaaaggtagtctctccatccgtgcttatgttgataaaatcaaaggcctgtatgctcttcttgcagcatctggttctcaaatctcggaagacgagaggacggcggntntgcttgtgggcttgtcgt

SEQ ID NO: 15010 - DNA, 600 bp, Gossypium hirsutum
  unsure (1)..(600): unsure at all n locations; Clone ID: LIB3829-019-Q6-K6-C9
cggncgcgtgggcttngaggtccacttggatttggtttgttgatgagctgccgcatagcacaggcctttcaactatactatgtatttgtcaagtgtacttaagggtgacaactttgagggaactgtgggtgcccaaagaggacaatttcggcatatgttcttatgacatggcccatgctcagcaggcggagttaggttgtgacataaaaaagcacacatgagggtgacagaactttatgaacttttgagtgcccaaagtggacaattccagcttatgctttcacaacactgccatgcttcgtgggttgggtcatgacaacaaaagagactcttttccccctttttgctagatagaagagatgattaacttacaaggaggcgtttaccaccaattagatctcatatgtttcttccattgattcttttgccatgggttgctggcgctgcagttattcatgagaagaagcctctcaattacagatgtcactttggaacttactggacaatacccgttgtatgtcttcactcattatatgttgctgttctgatggggttcacaagggcaattcggcatatagagtttaggtttcatgaactcag

SEQ ID NO: 15011 - DNA, 579 bp, Gossypium hirsutum
  Clone ID: LIB3829-019-Q6-K6-D1
gttattgaaatttctttctcgattttctctttagccaaaaaagagcagatcttcgtcaagactctaaccggcaagacgatcactctcgaggtcgagagctccgacacgatcgacaacgtgaagaccaaaatccaagataaggaaggcatccctccagaccagcagcgtctgatcttcgccggaaaacagcttgaggacggccggaccttggccgattacaacatccaaaaggagtcaactctccacctcgtcctccgtttgcgcggtgggatgcaaatcttcgtgaaaaccttgaccggcaagacaatcactctcgaggtcgagagctccgacacgatcgacaacgttaaggcgaagatccaagacaaggaaggcatccccccagaccagcaacgtctcatcttcgccggaaaacaacttgaagacggccgtaccttggccgactacaacatccagaaggagtcaacgctccatcttgtccttcgtttgcgtggcgggatgcaaatcttcgttaagacgcttacgggaaagacgatcactctcgaggtcgagagctctgacacgatcgacaacgtgaaa

SEQ ID NO: 15012 - DNA, 594 bp, Gossypium hirsutum
  Clone ID: LIB3829-019-Q6-K6-D10
gccaccagcaaaatttagaactatttgttcaagtattgacaagctagacaaacaatcctttgaacaggttaaaaaggaaatggtggaagagaagggattatctgttgagacagctgataaaattggcacttttgtgaagataagaggacctcctctggaattattgtcaaagattatgggaggaactgagggtagtgagcttcttaaacacaatgcttccaaagaagcattaggtgacttgtccattttatttgatgctttgtataaatcaaggtgcatagacaaagtggttttcgatttgagtctcgccagaggtcttgattattatactggtgtcatatttgaagctgctttcaaaggaggtgtgcaggttggttcaattggtgctggtggacgttatgacaatctgatcgggaattttggcacaaagcaggttccggccgttggcatgagtcttggaatcgaacgagtgttgaccataatggaagagaaagcacagaaccaggcagtccgagccacggaaacccaagttttggttgctatcctgggggataaactcgctgtagctgcagaattggtcagtgagctttggga

SEQ ID NO: 15013 - DNA, 597 bp, Gossypium hirsutum
  Clone ID: LIB3829-019-Q6-K6-D11
ggctgctatgccatcctctccggtggccttccgagaaatctgtcacctactgtgcagttcaagtcagagtacaggagtgctggcaatttggattctatgccagttaggaaggcaacgacaaacagcttgcaacagagtgatcaacctgcatcttcaagtacatcattccaaatggccggtatatcaaaatccgagattcagaaggctgcagctccaaaaccaaccgaaaaactaatgacctcacaagtacctgtcatgtcaaggccctcaagtgctcctctagttcctggtcctaggccaacaactcttgtttctacggttcaaactactccttttcttgctcgttccgttagtgcagctggccgtttaggtcctgacccgtcaccagctactagttatgttcctcagtcctacagaaatgcaataatgggtaaccatgtttcttctagctcagctggtttcactcatcccaactcccgtagctcaggagtgaattcgctgccagcatactcacaaccacctgccttggtatctgcaccggtttatataccccatagccccgataggatagagccaaattctgtccagtcgggcttt

SEQ ID NO: 15014 - DNA, 611 bp, Gossypium hirsutum
  Clone ID: LIB3829-019-Q6-K6-D12
gaaaacgcaatgctgatgctgtgtttgcattccagctcagaaatcctgttcacaatggtcatgctttgctaatgaccgatactcgtcgtaggcttcttgagatggggtacaagaaccccatacttttgcttcatccattgggaggctacacgaaggcagatgatgttccacttagttggcgaatgaaacaacacgagaaggtgctcgaggacggtgttctcgatcctgaaacaacagtggtctctatattcccatctcctatgcactatgctggcccaactgaagtgcagtggcatgctaaagctcggatcaatgcaggggctaatttttatatcgttggtagagacccagctggcatgggccatcccattgagaagagagacctgtatgatgccgatcacgggaaaaaggtcttgagcatggcgcctggactcgagcggctgaacatccttccgttcagggttgccgcgtacgataagacccaaagcaaaatggctttcttcgatccctcgagagctcaagacttcctcttcatatcaggcaccaagatgcgagctcttgcgaagaacaaagagaaccctccagacggattcatgtgccctggcggttgg

SEQ ID NO: 15015 - DNA, 587 bp, Gossypium hirsutum
  Clone ID: LIB3829-019-Q6-K6-D2
aaaaaacgaaaaagcatcccttcctcatatctctctcctcctttggaactccaccgagcaacacaacccaaatatttgttattattatagatatgaacatagggagtatggattcttcttccggtcccaacaattcccttgctttctctctttccagccatcaccaccaccaaaatcatctcagcttcttctcttcttcttctaaccccactctctttcaagctttcaacacttccgcagccgccgccgtcccaacaacaacaccacccgcaaactcgttatcagccgaaaaagatgcaggtggcgaaggtccagctacaaccgctagtgcaacaacagacttgtccatgtttaaaggtggcccgaaactcgaggattttcttggcggttcttctactacacctggagttggaggtgcacctcaactgcagttgcttcatcatcataacttctctactcaaacacccgtgactgtttctgacaacgatatatatgattctgagctcaaaaccattgctgctatatttcttcgtggattttcctctgagcaaatcgatattcacaaacaacagcaacaagcacctata

SEQ ID NO: 15016 - DNA, 601 bp, Gossypium hirsutum
  Clone ID: LIB3829-019-Q6-K6-D3
tattttccaagctaccattgcacaattgtttcagtgcagaattgctcttagaggaaacatagaatacaatgatcttgtacccttagacaagcagaatgcaccactgaccgacagatggggatggtccaaagaattagaaagatttgccgggaaaaatgtagtccagagcatcgtggggaccccaatgatccatgtggaagattgaaaagagattgtgtaggaattatggctgcctttaaactcaagcaaccttttcatcacgccgttgcccatctttattggtttttcagtatcttatttctggtaactctacatcatcggatagatgtttggaagaacttccccttcccttgtgcagtgtttatgcttcgacaagaggagaaccactatttacgacctacacccccacctttactaatacacttgactatattttcttttccccatctgacagcctaatgcctgtcagcattctccaacttccagagttggattctggtgcattgtcaaactatagccacccaagtgatcatctgccaataggtgctaaatttgaaattaccaaagaccaaatgttcatactgagaaatgaacgaaaata

SEQ ID NO: 15017 - DNA, 581 bp, Gossypium hirsutum
  Clone ID: LIB3829-019-Q6-K6-D4
cggccgcgtgggctccagctcaatcaaatcgagtttgtaatgctcttgctctgcttcagtgtgtagcttctcatccagacacaaggatgttattcctgaatgctcatatacccttgtatctgtatcctttccttaatacgaccagtaagtcaaggccgtttgagtatttgaggcttactagcttaggtgtcattggtgccttggtgaaggttgatgatactgaagttatcagcttcctcctgtccactgagataatcccattatgtctgcgcacaatggagatgggcagtgaactgtcgaaaacagttgctacttttatagttcagaagattctactagatgatgttggcttggactatatttgcaccactgcagagcggttttttgcagttggtcgagttctgggtaatatggttgcagcacttgctgagcagccctcttcgcgactactgaaacatattattcgatgttatcttcgtttgtcagataacccaagggcttgtgatgcattaagaagttgccttccggatatgctacgagatgtcacctttagcagttgtcttcgtgaggatcaaaccact

SEQ ID NO: 15018 - DNA, 590 bp, Gossypium hirsutum
  Clone ID: LIB3829-019-Q6-K6-D5
gtcagactcgtgagcatgctttgcttgcttttaccctcggtgttaggcagatgatttgctgctgcaacaagatggatgcaacaaccccaaagtactcaaaggcaaggtttgatgaaattgtcaaggaagtctcttcttatcttaagaaagttggttacaaccctgagaagatcccatttgtcccaatctctggttttgagggtgacaacatgatcgagagatctacaaacctcgattggtacaagggtcctactctccttgaggctcttgaccagatcaccgagcccaagaggccctcggataagccactccgtcttccacttcaggatgtctacaagattggtggtattggaactgtccctgttggtcgtgttgaaactggtgtcctcaaacccggtatggttgttacttttggtcctactggtctgaccactgaagttaagtctgttgagatgcaccatgaatccctcccggaagctttccctggtgacaatgttgggttcaacgttaaaaacgttgctgttaaggatcttaaacgtggttttgttgcttcaaactccaaggatgatccggccaaggaagctgccaac

SEQ ID NO: 15019 - DNA, 606 bp, Gossypium hirsutum
  unsure (1)..(606): unsure at all n locations; Clone ID: LIB3829-019-Q6-K6-D6
ccccgcgtccggnaagagcatccctttataccccactttaagttactcaaaatttccgtacttttattttttgcatggcagtaagtctattgtcacatgagttgtctgacctgtgtcttgggaagccagcactaaggtcactttccatcacatccaccattgctgaagctcttgaggtcttgaaaacctctgatgacaactttgttagtatctggaattgtgatgatgttgagtgttgtagtagatgtgtaggcaaagtttgcattgtggatgtgatttgttatctttgcaaagatgaaaatttggtatcaccttcaattgctttgaaacaaccagtttctgtacttttacctaagatccctggtcttattatccatgtggaaccatcttgcaggtatatttatatacacacatgatttctagcttttttttcttcaatgttttatttaagttttgttttatcaattttcataattttcagcttgttagaagcaattgatcttatacttgaaggagcacaaaaccttgtggtaccaatcaaaaccaaggtgttcaacaacaagagatcaaaacagcaacagaagccattttgttggttaacacaag

SEQ ID NO: 15020 - DNA, 585 bp, Gossypium hirsutum
  unsure (1)..(585): unsure at all n locations; Clone ID: LIB3829-019-Q6-K6-D7
ngattgtttcaattggatggaggcgttaccagaccacgcctgtttatgccattgaggaccaaaatggaagacatcgcatgctcaagtatactccagaacatatgcattgccttgctatgttttggggccctcttgctccacccaagactggagtgcttgctgttcagaatttatctaacaatcaggtcactttgctcaattttatgtacttttcatgttatcatccttataaaatatggaacaagtgaggatggtggtgagtgataatatagtcaagaatctgggaagtcttcacagtaccgtctggcagtttagtccctctcctaaaaacatagccaatttaatcttcgtacttttaaaacttaagcaaaaagatataatatgtaactgggtttggtgaatatttaaatattgttgatgtgccggtaaaatggtgaccatcggaaattaaagcctacatcaccacccagttatttattggttctggtggatcattgttatacagagaattaaatattcttcttttactaaattagatgtggcctctaatacaatgagaggtttaagtggtaaaacttttttgta

SEQ ID NO: 15021 - DNA, 590 bp, Gossypium hirsutum
  Clone ID: LIB3829-019-Q6-K6-D8
gttcgtgacccagtgatcgaaaaaaacggaacacttacttgcgcttgatggagcaaaggaaaggctccgtttgttcaaggcacagctgctggatgagggagcttttgattctgtagttgatggatgcgtaggagttttccacacagcatctcctttttatcacaatatcaaggatcctcaggctgaaatgcttgacccagctgtgaagggaacacttaatgttcttaggtcatgtgctaaggtcccatctatcaaacgggtggttataacatcctcaattgcagctactgtgtataatggaaggcctcttggtcctgatgttgtagttgatgagacttggttctcagatcctgctttttgtgagaaatcaaagctatggtatatgctttctaagacgttagctgaggaggctgcttggaagtttgcaaaagagaatggcattgacatggtgacaattaacccagggttggtgattggacctctcttacagccgactgtcaatacaagcgtggagccaattttgaaacttattaatggggccaaaacatttccaaatgcaacttttagactaatagatgttagagatgttg

SEQ ID NO: 15022 - DNA, 606 bp, Gossypium hirsutum
  Clone ID: LIB3829-019-Q6-K6-D9
ggtgcccaccgccatttccggcggaggagagccgatgcctcgggtgttgtttggaggtgctccaaccctggaggaggctaaggaagccgctagtgatttgaaagatgcattggataaggcttatctatcatctctgaattcgaccgatgatacccggtcatctcgctcctcattgctttcggaggagactaaagattgcgttgcatatgatgccaaagccactttactaccaaagcctgcagttcaggcattcaaattactcaatgagagtcctgcagttcagtctatggttgcgtcaattgctgcggatccgaatgtatggaatgctgtactgcacaatccggcttacatggacttcatagggtcgcataagacgaattatatatttgaagggaatagatcccgtcagggttgtgaatctacgtcggtaaagatcgaagaatatttcaaagcaaatgaaggcaaagaagttggaaatccattttcggaatttctggagaacttgaagagtagtgtggttgaggtggctaataaagcaactgatttcctccagtgtctctttactatacccattgcaggaatggagaaagaaaatggtggattgaa

SEQ ID NO: 15023 - DNA, 468 bp, Gossypium hirsutum
  Clone ID: LIB3829-019-Q6-K6-E1
gcgagagcttatgatgctgaggcacggagaattcgtggtaagaaagctaaggtgaacttccctaacgagactccgcgtacctctccaaagcatgcagtcaagacaaattctcagaaaccactttccaagtcaaatttgagccctgttcagccaaatctcaaccagaattacaattacttgaaccagcctgagcaggaatactttgataccatgggtttcgtagaagagaagccatcggtcaatcagttcgcatacgtggaccctgttcctacgtctatagatgctggatttaatcaatcagataatgcccccttgtacttcaattcagaccagggaagtaactcgatcaattgttccgactatggctggggagaacagggtgccaaaactcctgaaatatcatccattcttgaagcttctgtagagggtgatgagtttcttgaggatgctaaccctagcaagaagctg

SEQ ID NO: 15024 - DNA, 604 bp, Gossypium hirsutum
  unsure (1)..(604): unsure at all n locations; Clone ID: LIB3829-019-Q6-K6-E10
gaaagacactactttgtgcaaaagctacagacaacaaccaaaatggatcacgaaaagccagcagcttgtgtccttgatgcatcaacctatgtgggtttttggattctcaaaggactgttgaatagagggtacacagttcatgcagctattcagatgaagggatcagagacagatatagtgaagaaaattaaggaaatggaaagagtggaggagagattatcagtttttagtgtggatattctggattaccatagcattcttgttgctttgaagggttgctctgctttgttctgttgtttagactgtccagatggttatgatgatctaattgtggatttggaagtgaggggagcaatcaatgtagttgaggcctgcgcacaaacagatagcatgcagaaaattgtattcacttcttccttaactgcagctatttggagagaaaacatttgttcacagacagatgtagatgagaggttttggagtgatcaagatttctgccgcaaaatgaagttgtggtatgcccttgctaaaacactcttcgagcaagctgnctgggctcttgccatggatcgaatgcttaacatggtttctgtgaatgctggac

SEQ ID NO: 15025 - DNA, 599 bp, Gossypium hirsutum
  unsure (1)..(599): unsure at all n locations; Clone ID: LIB3829-019-Q6-K6-E11
gtttgcctttcatttctttctctattccttgttgcttcctcggcagcctctcggtttctgagtaatcgaattaaaaaagatggggctgtcttttgctaagctgtttagtcgactgtttgccaagaaagagatgcgaattcttatggtgggtcttgatgctgctggtaagactaccattttgtacaagctcaagctcggtgagattgtcactaccattcccaccattggctttaatgtggagaccgtagaatataagaacattagcttcactgtttgggatgttggtggtcaggacaagattcgacctttgtggaggcactatttccaaaacactcaggggctaatctttgttgttgatagcaatgaccgtgaccgtgtggttgaggccagggatgagcttcatcgtatgctaaatgaggacgagctgagggatgctgtgcttcttgtgtttgcaaacaagcaagatctgccgaatgctatgaatgctgctgagattactgataagcttggccttcactcccttcgtcagcgccactggtatatccagagtacttgtgccacctctggcgnaaggctgtatgagggactggactggcttt

SEQ ID NO: 15026 - DNA, 609 bp, Gossypium hirsutum
  Clone ID: LIB3829-019-Q6-K6-E12
ctgatggcagcttactatcccaacaacgtcactactgatcatattcaacagtatctggatgagaacaagtcattgatcttaaagattgttgagagccagaattccgggaaatttagtgaatgtgctgagaatcaagcacggctgcagcgaaacctcatgtacttggctgcaattgcagattctcaaccgcaacctccggccatacatgcccaggctggagggcactacatgcagcaacagcaacaaactcaacagatgacaccgcaatcgctaatggctgcacggtcctccatgttgtatggtcagcaaccattttctgatctccaacaacaagttctgcatggtccacttggcatgagctccggtggaagcacgggtcttcacatgctgcaaagtgaagctagcactacaggtggcaatggagcacttggagctggagttttccctgctttcaggcatggctcttctggagaaggcaagcaagacatcggtagtgcagggtcagccgaaactcgtggagttctcggctgcgattgacggcctaatgatctgtctactatccagatttagcatagttaagaagatgaatttaggggatatatatttttt

SEQ ID NO: 15027 - DNA, 597 bp, Gossypium hirsutum
  Clone ID: LIB3829-019-Q6-K6-E2
ctttctttgtcctaaacatcctccttttcctctccagctccgcggctacaccaaagagcggtgcagatcacgacctggtccgttcatcatgtgtccacgccagctatccaagcctctgttttcgcaccctttcttcctactccggcccagccaacaccccacgtgagttagcccaagccgccgtaaaagtcagcctgtcccgtgcccgtaaagtgtcgaactacttgtcgacgagtgtgacggggtacaacaagagggaacgagtcgcactgagtgactgcgtggagcaaatagatgagtcgatggaggagttgagcaagacattaggggagttgaagcacttgagaggggagacgttcgagtttcagatgagtaatgcgcggacatgggtgagtgcggcgctgacgaatgaggacacgtgtcttgatgggttcgaaggagttgacggcaaggttaaatctaatgtgaagaggaagatcacgaatgtggctaaagttaccagtaatgctctgtacatgatcaataggctcaatgaaagtcgtggtaggcaccgttgaatctttgatgatgatgatgatgaataatggatggttgtga

SEQ ID NO: 15028 - DNA, 597 bp, Gossypium hirsutum
  unsure (1)..(597): unsure at all n locations; Clone ID: LIB3829-019-Q6-K6-E3
aaaaccccatcaagttcctctgtagttacggcgngaaaaatcgtccctcgttaccctgacggcaaactccgttattacggcggtgaaacccgtgtcctcgccgtcgatcgctccattcccttctctgagctgttggtgaagatgggagagatgtatgggtcagcggtgagcctacgttgccaattgcctacagaggatttagacgcgctggtttcgatcacttccgatgaggatctcgtgaatctcatcgaggaatacgatcggctagcgtcgccaccatcttctataaagatcagagcttttctttcgcctccgagatccaccaaaaaagatgtttctccgccttcgtcatcggcttcgtcttcaaagtcgtcatctacatccactcctagatactcctgcatacgccagatctcgaggactcccgttgcctatcctcttcgctcggaaaaatctgcggggaagatgatcccttactatggttaccatgttcaccatggcaaccctagccatatttaccttattaacagcgggaatcactggcaatagcagaagatcgaaacaaacgaggatcatatagtttattaatccgttatg

SEQ ID NO: 15029 - DNA, 587 bp, Gossypium hirsutum
  Clone ID: LIB3829-019-Q6-K6-E4
tgtaaaatccgaagggaatcccaatttcttcgcttttcatcttctctcgcttccatttctccgtttttccccctccggcaatggctatcgattctgattctttcaaacaatcacttctccctagcttcctttactcttctgctcccaactcattctctctggatcgactcctcaacgccaacagccctgctttctctgcttcacgctccactatacccggtgcccccgcggcctcttcctcgccgtcgatcaaggcgagaactttcatgatcccctcccccaatgagcccgggaagaagattgagatgtattcgcctcagttctacgctgcttgtacctttggcggtatccttagctgtggtctcactcacatggccgttactcctcttgacctcgtcaagtgtaatatgcagattgaccctgcaaagtacaaaagtatctcatctggtttcggagttctactaaaggagcaaggagtgaggggcttcttcccgggttgggttcctacccttcttggttacagcgcacagggtgcttgcaagtttggattctatgagttcttcaagaagtactattctgaccttgct

SEQ ID NO: 15030 - DNA, 221 bp, Gossypium hirsutum
  unsure (1)..(221): unsure at all n locations; Clone ID: LIB3829-019-Q6-K6-E5
gccgcttgagcgtatcttagactgaactgattctttaggattgttttgttgngaagagtaacaataggcacatagtcacgcacttcgctattaaaatatgagcatatctcatgcattatttgatttgtaaaagtctatgtttgtgcacatttgatttggttgtatttgctcatcattcgatgaaagttgcaatgataccccctaaattaaatttctgttgt

SEQ ID NO: 15031 - DNA, 606 bp, Gossypium hirsutum
  Clone ID: LIB3829-019-Q6-K6-E6
gttgagttcttcgcgccttggtgtggccattgccaaactttaaccacctacatgggagaaagcctccaatgtcttgaaaggtgtcgctacagtggcagccctcgatgctgatgctcataagtctctttcccaggaatacgggattagaggatttcctacaataaaagtgttcgtccctggaaagccacctgtagattatatgggagctagagatgtcaaacctattgccgaatttgctctccagcaggtaaaggcacttttgaaagaccgtctcgctgggaaagcatctggaggatcaagtgagaaatctgagtctagtgcatctgtagaattgaattcccacaactttgatgaattggtgctcaaaagtaaagaactttggattgtggagtttttcgctccttggtgtggacactgtaaaagacttgctcctgagtggaagagggctgctaataacttgaaggggaaggtgaagcttggtcatgttgactgcgattctgagaagtctctcatgagcaggttcaacgttcaagggttccctaccatcttagtatttggtgctgacaaagacagcccagttccttacgagggtgctagaaccgcctc

SEQ ID NO: 15032 - DNA, 567 bp, Gossypium hirsutum
  Clone ID: LIB3829-019-Q6-K6-E7
aaacgttgaattattacacgaaacatgaaaacccacttttttcccctggttttcctcctcattttttttagcccaaggtctgaaccccaaatgtgacatccaagaccatggctcaaacctgcaagtgttccatgtttacagtccatgctcacccttgaaaccctcaaaaccactctcatgggaagaggatgtgctgcaaacgctagccaaggaccaagccagggtgcagtttttgtccagcctcgtggctaagaaatctgtggtgcctatagcttcaggcaggcagattgtgcaaagtccaacttacattgtgaaggccaatattggaaccccacctcaaaccatgcttatggccatggatacaagcagtgatgctgcttgggtgccttgcactggctgcattggctgctcttctactgcttttgactttgctaaatccaccactttcaagacccttggctgtcaagctgctcaatgcaagcaggtaattaagctgccaagctttcatatattacctgcttagccacccgctttggctgggtaagtaattgtatttcatcataaagt

SEQ ID NO: 15033 - DNA, 604 bp, Gossypium hirsutum
  unsure (1)..(604): unsure at all n locations; Clone ID: LIB3829-019-Q6-K6-E8
cggncgcgtgggcggacgcgtgggcggacgcgtgggttttttttagcttgaaagagaccatttttttctttactatgaacatacagtgattaaactgaaaattacataaacattcagcaacttatcaagaaaatacatgagaagaatgaagtgaaaaggaaaagcggaaaaaagggaaaatgtgtttaagaaaatatgaagaaaattgtacatcactgtagtataaaacaaatatatgtatgtatgtatgtatgtatgtatgtatatcagcttcactttggtttcacgtttgaattaagatctccaaggctcttcttcattcttcgcataatcaaaggaacaggcttttccaaaacagacacgttaatgttgttccagacatctgatttggttggcagttgcacgattttttcagcaacctccatgtcttcgggaagaactgaaccgaacacggtgtatgagtttttccattctctgtggtttgctaggcttataaagaactccggaccagagccaatccaggcaactgatccccttcttatggtagggcaagcctcagttggcatcttgttgaatggggttccttgggcttcaagaattcctt

SEQ ID NO: 15034 - DNA, 608 bp, Gossypium hirsutum
  unsure (1)..(608): unsure at all n locations; Clone ID: LIB3829-019-Q6-K6-E9
gtggaccattacctatggnaacaaaatcctcgaccgtgattctctcgtccaagctataaaagaggtcgattctcttttcaacaaagatccttgggaactacccggttggtctaaaatacaatcagctgatcaagtgtggtatttcttttcccggcgaggagacaacaaacgggtgaagaggacaacggataaagggttctggaaagtgacgggaaagcctcggaaggtaaaggggaaaaaagggtttgctgccaagaaatctttggttttttatgagggtcgtacccctaatgcaaagtggacaccttgggtcatccacgagtatactttcacctctactcttgttgataacagagagggcatttttctctgtaaattgaagaaaaaagaagatgaaacagccaatgcttcaagtagtgaaagttgtcagccaagtctggttgcagacgaggagattcctgattactcaaccatgtttaatcctgacgagatgcttgacacattgaaagaacgagacagagagcatgagttggaggtggatgagcagcagcagccctcttgcttggaattcactcatttgcaggacgttaccactaactgtgatgggc

SEQ ID NO: 15035 - DNA, 590 bp, Gossypium hirsutum
  Clone ID: LIB3829-019-Q6-K6-F10
atttgtttaaccccagcaactcgttgaaatggcgtccaagttgtgtgactcatgcaaatcagcgacggccactctgttctgccgtcctgactcggcttttctttgccccaactgcgactccaaaatccatgccgccaacaagctagcctcccgtcacgctcgggtcttggtctgtgaagtttgcgaacaagcaccggctcacgtcacctgcaaggctgacgcagccgctctttgcgtcacttgtgaccgtgacatccactccgctaaccctctcgctcgccggcacgagcgggttcctttggctcccttttacgattccgtcaagcccaacacagcgtttaacttcctggacgaccgttacttatccgacgttgatggagacgctgacagcagcagggaagaagcggaggcagcttcgtggttgcttcctaaccctaaccacaaagcacatgaaagcccggacgtgaacacggggcagtacgtgtttcccgagatggatccgtatctagatctggattacggtcatgtggatccgaaaatggaaacccaggaccaggagcagaacagttctggaactgatggagtggtca

SEQ ID NO: 15036 - DNA, 604 bp, Gossypium hirsutum
  unsure (1)..(604): unsure at all n locations; Clone ID: LIB3829-019-Q6-K6-F11
gcgtttcggnaaaattagaaagaacaatcgtggttggttttcatttagaggggaaataaggaatagcagccaatcagccccactttttgttgagaataaatctgagtcttctgagaaaattcaaccattaccgtcacgaaaatccagctcatatgtattacctacaccagttgctacaaaaggttctgtgggattgggtaaacctgctcgtcaatcttacaagacaagtagttattcatctccacttgaacttcataaatatcagaggcttttgagagatataaaaatttctggatctgctgttataaatgctcaggcagtactgagagagagcaataagcctgcttcatcaactcaactaccccctcctttggctgataaggttttactttcacgagttagtccagctgctgcttctgattccaagaaaattaaaagacaagccttttctggtccattgacaagtaaacagtggcctagcaaaccagtttcggttgaacatccccaattgttctctgggccaattttgagaaatccaatgtctcaactgcaagcagcatctccaaaagtatcaccaaatgcttcccctccatttgtttcctct

SEQ ID NO: 15037 - DNA, 605 bp, Gossypium hirsutum
  unsure (1)..(605): unsure at all n locations; Clone ID: LIB3829-019-Q6-K6-F12
tnctgggagaagcaggaaaggactcggcttgggcatgatactcttgtcgatggaatgttgaaagatggactatgggatgtttatggtgattgtggcatgggcagctgtgctgaattatgtgctgagaaacatgttattacaagggaggagcaggataactttgctgttcaaagctttgtgggtggggtggctgctcaacagggtggagcctttgcatgggaaattgttccggttgaagttcctggggggaggggaaagccatccatcatagtcgacaaggatgaaggtctaggaaagtttgatgctgcaaaattgaggaagttgcgaccaagtttcaaggataatggaggcactgttacagctggcaatgcctccagtataagtgatggtgctgctgctttaatcctagtcagtggagaaaaggcacttgagctgggattgcaagtgattgcaaagattgcaggatatgcagatgctgcacaggcaccagagtttttcacaacagcgccagcccttgcaatacccaaagccatttcaaatgctggcttggatgcttctcaagttgattactacgaaatcaatgaagcctttgctgttgtggctct

SEQ ID NO: 15038 - DNA, 589 bp, Gossypium hirsutum
  Clone ID: LIB3829-019-Q6-K6-F2
tgttctccatattgtaattgctatcttggcaggtagttgtaaattccatagcttgccgtagaaatcctttagatcggtctgtattaaataaaaattaggatccaatcgaacatcttgtaatagtttgtaggcactcctcactaaaaaatcaccagattgctctcccatccatactttaaaatcctcgtgaggtgtttctgccagcgggattcgtagaattttctgagcaacatcaactggaaagctatgattaattaagtcagttttccatgtcctgtttgtatcatcaattaaatctacaactaacttgacatcgttatcatttctggtaccccctctccctggatctaatcccggaacccaacaatcatcccatacggatattctggttcctcgtccgactctccagcacaacccgtcttgcagcaatcgcttagcatcctgacattcttccaggtaagtgaaggtaggttacccaaactagcattaagaaaatctgaatgcgggaagtatttatctttgagaacccttgctaataacgaatttggataaaaaagaattctccaaccttgctttgctaatagcgcaa

SEQ ID NO: 15039 - DNA, 595 bp, Gossypium hirsutum
  Clone ID: LIB3829-019-Q6-K6-F3
gcactgtaatgggtttttgcttatatctgccattaacgtttttatttgtgtttttgtaatgcagaaaatggggttatggacaatactggaagggtttttgctgcttgcaaatgcaatggcaatattaaacgaggatcgattccttgcacccagaggttggagtttctcggaattttctacagggcagaccaaatcatttaaaggccagcttattggtcttatttatgctacccaatacatgagacttcctcttattctactcaatgctatctgcattgttgtaatgttgatttctggttgatgattgcattgctctttcaaggtcagatgttcttgtttatgacttactattacgtgatagggatttaaatagcggtagctagctcaagtagtatcatatacccctataagtgacctatatgccataagtcgggtacaaactccaccaagggtgagccactcaagttgcctcttagtgggcgactgtatgcccacgtatagtcgaagtgctcccagctctgtgaaccaggttctcagggcagctgctcatggcacgttggctctcgacagagcacgggagacaaaatcctttctc

SEQ ID NO: 15040 - DNA, 584 bp, Gossypium hirsutum
  Clone ID: LIB3829-019-Q6-K6-F4
cggacgcgtgggggcggatgaggatattcaacctcttgtgtgtgacaatggaactggaatggtcaaggctggttttgctggtgatgatgcccctagggcagtcttccctagtattgtcggtcgtccacgccacacaggtgtcatggttgggatgggtcaaaaggatgcttatgtaggtgatgaagcccagtcaaagagaggtatcctcactttaaagtaccctatcgaacatggcattgtcagcaattgggatgacatggagaagatttggcaccatactttctacaatgagcttcgtgttgcccctgaagagcatccagtacttcttacagaagcaccactcaaccctaaggcgaatagggagaagatgacccagattatgtttgaaacattcaattctccggctatgtatgttgctattcaggcagttctttcactttatgccagtggacgaacaacaggtattgtcttggactctggtgatggtgtgagccacactgtgccaatttatgaaggctatgccctcccccatgctattcttcgtttggaccttgctggacgtgatcttacagattccttgatga

SEQ ID NO: 15041 - DNA, 598 bp, Gossypium hirsutum
  Clone ID: LIB3829-019-Q6-K6-F5
gcgttcggaacaaagccttcttcttagcactccgccgcccgttatctcatcgcaatcatgatcatcccagaaaagaaccgcagggagatatcaaagtatctttttcaagagggtgtttgctacgccaaaaaagattacaacttggcaaaacacccagaaatcgatgttccaaatcttcaagtaataaagctgatgcaaagcttcaaatccaaggaatacgttcgtgaaacttttgcttggatgcattattactggtaccttaccaacgatggcattgaatttttaaggacataccttaatctcccctctgagattgttcctgctactttgaagaagcaaactaggcccggtggtggtcgtcccatgggtccttctgatagccgcccacgtggtccgccacgctttggcgacggtgagaggcgattcggtgacagggatggataccgtggaggtccacgaggaggcggtgatttcggtgataagggtggtgcgcctgctgattatcagccttcattcaggggccctggttcaaggcctgcttttggtcgtggaggcggtggttatggtggtgccggttctgcaagcggcgcaggtcttc

SEQ ID NO: 15042 - DNA, 604 bp, Gossypium hirsutum
  Clone ID: LIB3829-019-Q6-K6-F6
cttcactgaccatcccaaacggttcccatccccgctaccgaacccattgtttctcctttgagtaatatggaaaggtttttggaatcggtcatgccttccgtccctgccctctatctctctaagacgacgatgagagggtggcggacgtgtgacattgagtttgagccatatttcgtgttaggtgatttatgggagtcgttcaaagagtggagtgcatatggagtaggtgtcccactaattttgaatgactgtgattctgttgttcagtactatgtaccttatttatccggtattcaaatatactccgattccaggaaaatgtcttccaagtcaaggcaaccaggagaggatagtgatagtgactttagggactcaagcagtgatggtagtagtgattgtgaacctgaaagaggaccaaatgttttgagagaaaaaagaaatcacatggcaagtgagatgtctcttaggatggagagattgttcatgggagaccagcagatgcttcaagaagacttctctagtgatgagggtgaatctgttaactctcggagttgtttaatttttgagtattttgaacaagacactccttatagccgggaaccct

SEQ ID NO: 15043 - DNA, 586 bp, Gossypium hirsutum
  unsure (1)..(586): unsure at all n locations; Clone ID: LIB3829-019-Q6-K6-F7
gntcaagtcacttggtgtcaaaatggttatctccggtgaaggctccgacgagatttttggtggatatttgtatttccacaaagcaccaaataaggatgaattccatcaagaaacatgccggaagatcaaagcccttcacctgtatgattgcttgagagctaacaaagcaacgtctgcatggggattggaggctcgagttccattcttagacaaagaattcatcaatgtcgccatggctatagaccctgaatcaaagatgattaataaggatgaaggacgcattgagaaatgggttcttagacgagcctttgatgatgaaaaccatccctatttgccaaagcatatcttatacaggcagaaagaacaattcagtgatggcgttggttatagttggatcgatggtctcaaagctcatgctgctgcaaatgtgaccgataagatgatgcttaatgcttcaaacatcttccctcacaacactccgaccacgaaagaagcatactattataggatgatcttcgaaaggttcttccctcagaactcggcacgattgaccgtcccgggaggagcaagtgtagcatgcagcacg

SEQ ID NO: 15044 - DNA, 489 bp, Gossypium hirsutum
  unsure (1)..(489): unsure at all n locations; Clone ID: LIB3829-019-Q6-K6-F8
ttcgggnaacttttacaccgagcacatccatgccgacgaagagatacgctactgcttggaaggcagcgggtattttgatgttagggacaaggatgaccggtggattcggatttggatcaaaggaggtgatcttattatattgcctgctggaatctatcatcggttcactcttgacaccagcaactatgtcaagttgatgaggttgtttttgggagaaccggtgtggacagcgtataatcggccccaggaggatcaccctgcaaggaaagagtacattaaaagcttgactgagaaagttgggatgccattagctgctcattagagctatttgttacatgaagttcccctctatatatatgcgtgcatgtatgtatgtacacgtattagtttcataagtttctcaaaggctgaacttgataaaacattatgcatctgtatatcaaaacactgaattgcatctattaatgtataaatttcatgttatttagg

SEQ ID NO: 15045 - DNA, 602 bp, Gossypium hirsutum
  unsure (1)..(602): unsure at all n locations; Clone ID: LIB3829-019-Q6-K6-F9
tcacaatggcctctacaaccatggctctttcttccccatcattcgccggtaaggcagtgaagttctccccttccacccctgaaatccggggaactggccgtgtttccatgaggaaaaccaccaagcctgttccttctggtagcccatggtacggtcctgaccgagttttgtacttgggtccactttccggtgagccaccatcttacttgaccggtgagttccctggtgactatggttgggacactgctggactctcagctgatcccgagacctttgctaggaaccgtgagctcgaagtcattcactgcagatgggccatgttgggagctcttgggtgtgttttccctgagctgttggctaggaacggtgtcaagttcggtgaagctgtatggttcaaggccgggtctcaaatcttcagtgagggtggacttgactacttgggtaacccaagcttgatccatgctcaaagcattttggccatctgggcttgccaagttatcttgatgggagccgtcgagggttaccgtattgccggtggaccactcggtgaagtgactgacccattgtacccaggtggtagctttgacccattgngtcttgct

SEQ ID NO: 15046 - DNA, 591 bp, Gossypium hirsutum
  unsure (1)..(591): unsure at all n locations; Clone ID: LIB3829-019-Q6-K6-G1
caaaagnaaataaagtagaagaagcaatggccactcttacagtgcccacgacagttccttcagtgtctgaagattgtgaacaactaagaaaagccttttcaggatggggaactaatgagggcttaatcatagatatattgggtcacagaaatgcggagcaacgaaacttgattcgaaaaacctacgctgaaacctatggagaggatctcctcaaggcactagacaaggaactctcgaatgactttgagaggctggttctgctttgggctcttgatcctgctgaacgtgatgcccttttggctaatgaagccaccaaaaggtggacttcaagcaatcaagtccttatggaaatagcctgcacaaggtctgccaaccaactgcttcacgcaaggcaggcttatcatgctcgttataagaagtcgcttgaagaggacgttgctcatcacacgactggggacttccataagctcctcctacctctagtgagttcatacagatatgagggagaggaggtgaacatgactctggcaaaaacagaggcgaagttgcttcatgagaaaatttcaaacaaagcttacagtgatgacgatg

SEQ ID NO: 15047 - DNA, 594 bp, Gossypium hirsutum
  Clone ID: LIB3829-019-Q6-K6-G10
ctcagccactgcaatacgtagtcaatgcagccttcttagccgccctatatagtgattatcttgatgctgctgatacacctggatggtattgtggtcccaatttctattcaactgatgtcctgcgtgaatttgccaaaacccagattgattatatccttggcaaaaatcctcgaaaaatgagctatgttgtgggctttggtaaccattatccaaagcatgttcaccatagaggtgcatctatccctaagaataagatcaaatataactgtaaagggggatggaaatggagggatacgtcaaaaccaaaccccaacacacttgtgggagccatggtagctggacctgacaagcatgatgggtttcgtgatgttcgcaccaactacaactacacggagccaactctagcaggcaacgcagggttggttgctgcactcgtggcattgtctggtgacaaggcaaccgggattgacaagaataccattttttctgcagttccaccaatgtttcccacaccaccaccacctccggcaccttggaaaccatgaaaactttttgatctttcttctgtccatgtgtgacttacagtctgatgat

SEQ ID NO: 15048 - DNA, 600 bp, Gossypium hirsutum
  Clone ID: LIB3829-019-Q6-K6-G11
aaaatatctgctttttcttagttttcctttttgtcccttgtttatttgatatttccccctcatggccgccgctgatgtcgagttccggtgcttcgtcggagggctcgcatgggccaccgacgaccgggccctcgaagaagccttcagtgcgtttggtgaaatcgtcgaatcgaagatcattaatgatcgtgagactggaagatcccgaggctttggattcgttactttccgtgacgagaaagctatgagggacgcgatcgaaggaatgaacggtcaaaatcttgatggaaggaacatcaccgtcaacgaagcccaatcgcgcagaagtggaggcggtggcggaggatttggaggaggaaacggtggttacagccgcggtggaggcggcggcggatatggtggtcgccaaggaggatatggtggcggacgccgtgaaggtggatacggaaatggtggagggtatggtggtggtgggtaccgaggtggacgccgtgaaggaggatatggtgacggcggatctcgttactcaaaagcggcggtgcatctgaagcagctggaggtcttaagtttaggtttcaaagtgggcttgggcctatattg

SEQ ID NO: 15049 - DNA, 602 bp, Gossypium hirsutum
  Clone ID: LIB3829-019-Q6-K6-G12
gcgttcgaatattagggtttcggcatagcaactctctcttatctcattttctttgcagccaaccttttaacaaatatctacagcctaaaatcaacctgttagagcctcattttacagtcgccggacccatcattcaatttgacggtcgacggtgcacgagcagagatccgatcttgcccacaaagatcacccatggaaattaggggcagttgtacagaaaagatggccctggtgacgtggaggaggccgttcggggaaactgctcgtgggagccgaccttctggcactgttctggcatattccagaagcttctggtgttcacagctgctgagcttctctttgggtcttgttgggcctcaggtttgggccattgaaactgggtctagggttttaatggttgggtcagattcatgtaattgggttaagtctagatttaaggagtttgggttcaatttaatttaatcccaaatatttgtaaccggacattggactcctaaatttggattctttatttgcttttttttttattttaatttacttggacttatttgtttggcttattttaatgctttaaataggcccgagcaaaatgggttaactac

SEQ ID NO: 15050 - DNA, 589 bp, Gossypium hirsutum
  Clone ID: LIB3829-019-Q6-K6-G2
aaaaaaaacatacgcaatgagcactgctggtcaggttattcgttgcaaagctgcggtggcatgggaggcggggaagccactatcgatagaagaagtggaagtggcaccaccccaaaagcatgaagtccgtattaagattctcttcactgctttatgtcacactgatgtatactactgggagtgtaagggttacactcctctgtttcctcgtatacttggtcatgaagcctcagggatcgtggagagtgtgggtgagggtgtgaatgatttgaaacctggagatcatgtgctccctatcttcaccggagaatgcaaagaatgtcgccactgtctgtcagaagaaagcaataacatgtgcgaactgcttaggatcaactgcgaccgaggtgttatgcttgctgatgggaaaaccagattttccatcaacggcaagcctatctaccactttgttggaacctcgacctttagccaatatactgtcgtccatgttggccaggttgccaagatcagtccaaccgcccctcttgataaagtctgtcccattagctgtgggatatgtacaggttttggggccactgtgaatgttgct

SEQ ID NO: 15051 - DNA, 599 bp, Gossypium hirsutum
  Clone ID: LIB3829-019-Q6-K6-G3
tcgctgattcgactattgggtcaagtagaagttctcacgggtcggctcataccgacattgctgcaaccacaagaggtgcttctgctgatagagtacagactcgtggtttagctcgtgcaaccggagatgcagtggctaatttgtactcggaactgcgggaagaagctcgagaccatgcccgattagataatgcatgtttcaaacaggtatcttgttataaaattgttgcacgtatttaaactaacacattcatagatttgacgttttgttagcatgcgatggaatgagttgttcgcctgctcaacttatccatacggttaattgaaataggcacgccgagcatttctcgtcggcaataaggctctagcaaagcaatgtagtttgtgcagttgtgcagctcacagaaaagctcgagaatctatctattgccaaaggaatcaggtttcggtttctccagagaatgtgcgagggaaagaacacatgatagacctgcatggattgcatgttagcgaagccattcatctgcttaatcatgaattatctgttctaaggagcacagcacgggcagcggatcaacatttgcaggtttacatatgcgt

SEQ ID NO: 15052 - DNA, 599 bp, Gossypium hirsutum
  Clone ID: LIB3829-019-Q6-K6-G4
ctcgcctctcgcttattggttcaagatctggttttgatctgatcagatcgtataaaaatatcaaaacatgtttgggagagcaccgaagaaaagcgataattccaaatactatgagattttgggagtatcgaaaaacgcttcccaagatgatctaaagaaagcttatagaaaagccgctattaagaatcatcccgataaaggcggcgatcctgaaaagtttaaagagttggctcaagcttatgaggtgctgagtgacccggagaagcgtgagatttatgatcagtatggtgaggacgcccttaaagaagggatgggcagcggtggcggtggccatgaccctttcgatatcttccagtctttctttggtggcaatccttttggtgctggtggaagcagccggggcagaagacaaagaaggggggaggatgtaatccatcccctcaaggtatcattggaagatctctacaatggaacatcgaaaaagctttctctttcacgaaacgtaatctgctccaagtgcaagggtaaagggtctaaatctggtgcatcaatgaaatgttccggttgtcaaggttcaggaatgaaagtctccatccgga

SEQ ID NO: 15053 - DNA, 602 bp, Gossypium hirsutum
  Clone ID: LIB3829-019-Q6-K6-G5
gcagtgctgcggcatttcttcctcagaagacccgtcaaacagaaatgaagttcaacattgcaaatccgactactggttgccaaaaaaagctggaaattgatgatgaccagaaacttcgagccttttttgacaagaggatctcacaggaagtcagtggtgatgccctcggtgaggagtttaagggctatgtattcaagatcatgggaggctgtgataaacagggttttccaatgaagcaaggagttctcactcctggacgtgttcgtcttttgcttcacagaggtactccctgcttccgtgggtatggtaggagaaatggagagcgcaggaggaagtcagttcgtggatgcattgttagtcaggatctttcagttttgaacttggttattgtgaaaaagggtgaaaatgatcttcctggactgactgacactgagaagccaagaatgaggggtccaaagagagcatcaaaaatcaggaagttgttcaacctgtctaaggaggatgatgttcggaagtatgttaatacttatcgccgaacctttacaaccaaatccggtaagaaagtcagtaaggctcccaaaattcagaggttggtgactcct

SEQ ID NO: 15054 - DNA, 600 bp, Gossypium hirsutum
  Clone ID: LIB3829-019-Q6-K6-G6
gatttactttcggtttccatttacttctttatttctacgtttttgaatttttagtaagcgaaaatgagagagtgcatttcagttcacatcggtcaggctggtatccaagtcggaaatgcctgctgggagctttactgccttgaacatggaatccagcctgatggccagatgccaagtgacaagactgtcggaggaggtgatgatgcttttaacacctttttcagtgaaactggtgctggaaagcacgtccctcgtgctgtctttgtggatcttgagcctactgttattgatgaagtgaggactggtacttaccgtcagcttttccaccctgagcaactcatcagcggcaaggaagacgctgccaacaacttcgcccgtggccactacactattggcaaagagatcgttgacttgtgcttggaccgtatcaggaagcttgctgataactgtaccggtcttcaaggtttccttgttttcaacgctgttggtggaggcactggatctggtcttggttccctccttttggagcgtttgtctgttgattatggcaagaaatccaagttgggtttcactgtctacccatcaccccaggtctccaca

SEQ ID NO: 15055 - DNA, 596 bp, Gossypium hirsutum
  Clone ID: LIB3829-019-Q6-K6-G7
gcgttcgtcgtgtgacaggacctgctccagcttttttggcccaacgaaaacatttccccagcattacggagcatttcaagggttagcagcccttggacccagtgtggttcgtttacttatactaccaaatcttgaagcgtatttgcagcttcttgaacctgaaataaaaagacacgaggcctggtgtgtttatggggccctgctgcgttcagctggactgtgcatgtatgatcggcttaaaatgttccccagtttgctagcacccccaactcgtcccgtctggaaaagcaacaacaaagttgcgacaaataaacgaaaagcaagcacggacaccttgatgcagcagcaaccacctgcgaagaaaatagcaactgagagtgcaataggtatgatgccaataaattccatgcaaactgatttacaaggggcagttagcggcttttctaccaccgtaggaggttccaatatcggtgtatcatcaatgtcacggccgttatcaaacgataacatgctaggaagggaggttgggggtcgagtttcaaagacatcaaccgttctagctcaggcttggaaggaagacacagacccggggaact

SEQ ID NO: 15056 - DNA, 569 bp, Gossypium hirsutum
  Clone ID: LIB3829-019-Q6-K6-G8
cgtgaaaaccctaactggcaagaccataactctcgaggtcgagagcagcgataccattgacaacgtcaaagccaagatccaagacaaagaaggaatcccaccggaccaacaacgtctcatattcgccggaaaacagctcgaagatggccgtaccttggctgactacaacatccagaaagaatcaacacttcatcttgttctgaggttgagaggtggaattattgagccttctttgatggctttggctcgcaaatacaaccaagacaagatgatttgccgcaagtgttatgctcgtctgcatccaagagccgtgaactgccgcaagaagaagtgtggtcacagcaatcagttgaggccgaaaaagaagatcaagtagacactgactagtgttatactgtctgctttaaaagaaattgaatgtcagactaggaaaatatttccatttggttcttttgctattattctattttgttaagattttgtttgtgggttccggatttgatgttccaatgtatgtttggacaatcttatgtgttttttcttggaaattttaagaaggctagttttag

SEQ ID NO: 15057 - DNA, 601 bp, Gossypium hirsutum
  Clone ID: LIB3829-019-Q6-K6-G9
ctttttctaattatctctatcaatcaattgggttcttgtttttaattgaaaccctaatttcttaaagcctccattgttttttttttctcgtggatagtcaaggatcaaatttagcaatggcgaaaagttcctttaagcttgaacatcctttggaaaggaggcaggctgaatctggtcgcatcagggagaagtatccagacagagttcctgttatcgtggagaaggctgaaaggagtgacattcctgacattgataaaaagaagtatcttgttccatctgatttgactgtggggcaattcgtttatgttgtacgcaaaaggattaagcttagtgcggagaaagctatatttgtctttgtgaagaacactctccctcctactgctgctttgatgtctgcaatttatgaagaaaacaaggatgaagatggctttctgtatatgacttacagtggagagaacacatttggttccccataacttctttagcactacgctattatcaatctatgtaaatggctaaaaggaagtatcttgttccatctgatttgactgtggggcaattcgtttatgttgtacgcaaaaggattaagcttagtgcggag

SEQ ID NO: 15058 - DNA, 618 bp, Gossypium hirsutum
  unsure (1)..(618): unsure at all n locations; Clone ID: LIB3829-019-Q6-K6-H1
agcagaagcttcgccctcccaanagacaccaattgatgttgctgagaagctagcagctttgaaggccgttttccaggatgaaagacctgttgtaggagggaaagaagttccagtttttcttcccggtccctatgacttgagggagccagatattccattacataaccaaaacgtccaagcatcttctcctcagcttaatcctcaattgaatcatggaggtcctttgtttcattcgttagattctcatcattctagtatcggttctcaggtgaagttcatgggtccagaaggcttggtctatcatgatgccccaccaaatcatcaattatctgcaaatatgcttcgtcctctccatcatcctagcagtggactaactggatttgattctccaattcatcatcctatgttacaacaaatgcatatgcctggaaactttccttcaccccacttgcaacgacggattcctggtgttgcaccgccagcacctcattcaaataatcagatgactgggttacaggaaatgaatccaatgcatggttttcaattggggcatggtcaacggcagcctcaacccaactttgctggtcttggaatgcctccaggtcatgacgttggcag

SEQ ID NO: 15059 - DNA, 624 bp, Gossypium hirsutum
  Clone ID: LIB3829-019-Q6-K6-H10
gtttcagttcagagtcataagcaacatcaatggctccttcaactctgacggctcttgcggaagagaaaaccttgcaggcaagcttcgttcgtgatgaagatgagcgtcctaaggttgcttacaaccaattcagtaatgatatccctgtcatctctcttgctggtatcgatgatgttgatggcaagaggggtgagatatgcaagaagattgttgaggcttgtgaggattggggtgtcttccaggttgtggatcatggtgttgatactaaactcgtgtccgaaatgacccgtcttgcgagagagttttttgctttgcctgctgaagagaagcttcggttcgatatgtctggtggcaagaaaggtggtttcatcgtctccagccaccttcagggagaagcagtgcaagattggcgagagattgtgacatacttttcatacccattgaggagcagggactattcaaggtggcctgataagccagagggttgggttgaagttacaaaggagtacagcgagaagttgatgggcctagcttgcaagcttcttgaggtgttgtcagaggccatgggtttagagaaggaggccttgactaaggcatgtgtggacatggatcagaaagtggtgg

SEQ ID NO: 15060 - DNA, 606 bp, Gossypium hirsutum
  Clone ID: LIB3829-019-Q6-K6-H11
cttcttggtgtccttctgtgtaattattcatggactaagaaagaaatgttatgcatcacaattctcaggaatactgggaaagagctcgacacaagtggaagatctggtgtccagactagtattatctgcattgctgtttgattttgaatttacacatatgataccactttttaatctgaattttgaagggcttgtgtcttaattcctttatcgacttcaggaagacactaggtagaaattggtcaactctgataataaggttcgccaactagaagctcaagtttctgaagcaaaacaggcctcagcaaatgcaagaaaacaagtggaagaacttgaacatgaaattaaaggattgaggaaacatcttgagactgagaagcaggcaacccgagaagaagtatggagtaaagtttttgctcttgagcttgaaataaatgctgcaatgcgggatcttgattatgaaaagaggaggctgaaaggtgctagggaaagaattatgcttcgagaaactcagctacgagcattctattccacaaccgaggaaatctacatactgtttgcaaagcagcaggaacaactgaagccaatacagagaactctggaaga

SEQ ID NO: 15061 - DNA, 585 bp, Gossypium hirsutum
  unsure (1)..(585): unsure at all n locations; Clone ID: LIB3829-019-Q6-K6-H12
gggnaacgaagctcattattcgatcataaaacaaggccaattcattcatttggatgacttgtgcagagctcatatctttctattcgagaatccaaaagcggaaggtcgctacatttgcgcctctcaccatgctaccattatcgatcttgcgaaaatgctcagtgaaaaataccctgaatataatgttcccaccaagttcaaagatgtggatgagaacctgaagagtgtggagttctcctcaaagaagctcttggacttgggatttgagtttaaatatagcttggaagacatgttcgtaggagctgtcgagacatgccgagaaaagggactgcttcctctttctaatgagaagaagaccaacaacatagactgaaaaatatgaactttcaacaattgagtgcctacccgtctttcatttctagtggtgaaaacaatatagatttaaatctattatctgtttcctggtattgaaaaatttttaattgcaaacattggtaatgtaatttggagtctattttgggaactttgtgatttatctgatattttcagcattcctgataatcaaaggctcattttttactaccg

SEQ ID NO: 15062 - DNA, 600 bp, Gossypium hirsutum
  Clone ID: LIB3829-019-Q6-K6-H2
gtttgtttcattccgcagtcagcaggatgcacaaagcgcaattaatgacttaagtggaaagtggcttggcagtcggcagatccgttgtaactgggcaacaaaaggtgctggtagcaatgatgacaagcaaagctctgtgcgaaagtgtcgttgaacttaccaatggttcatcagaggatggtaaagagaccaccaataatgaggctcccgagaataatcctcaatatactactgtttatgtgggcaatcttgctccagaggtcacccaactcgaactccaccgtcacttccatgctcttggtgctggggtgattgaggaggttcgggtccagcgtgacaaaagctttggctttgtgagatacagtactcatgctggggcagctttggctattcagatggggaacactcagtcatttttatgtggcaagcaaattaagtgctcttggggcagcaagcctacaccaccggggacaagttcaaacccacttcccccacctgcagctgcacctttaccgggcctttcagcgattgacctattagcttatgaaaggcaacttgccatgagcaaaatgggtggcgttcatgctctaatgcaccctc

SEQ ID NO: 15063 - DNA, 587 bp, Gossypium hirsutum
  unsure (1)..(587): unsure at all n locations; Clone ID: LIB3829-019-Q6-K6-H3
cggncgcgtgggcggacgcgtgggcgaacagagtctgggatttttcgagctgttctaaaagctgatccaagttttgatgaagcaccttggccatctctatcttctgaggctagggattttgtgaagcgtttactgaataaggacccaaggaaaagattgactgcagcccaagctctgagtcatccctggataaaaaagtataacgatgtaaaagtgcccttggatatactgatattcaaactcatgaaggcttatctgcgttcttcatctcttcggaaggctgctttaagggccctgtctaaaactttgactgtggatgagctgttttacttgaaggagcagtttgcattattggaaccaaataaaaatggcactataagcttagaaaatatcaaagcggttctgatgaaaaatgcaacagatgctatgaaggatgctcgcatccctgagtttcttgcatcgctaaatgcacttcaatacagacggatggactttgatgagttctgtgcggctgcattaactgttcatcagctggaggctcttgatcggtgggaacagcatgcacgttgtgcttacgaaatctttga

SEQ ID NO: 15064 - DNA, 612 bp, Gossypium hirsutum
  Clone ID: LIB3829-019-Q6-K6-H4
ctcgcctcgcacatctgctcgcccggcggatttcgcgtcggaatagctcggccctgaacccgaaggtttgtggtggtccacgtcaaggctaatgatacatacagtttcaactcattacttgatttgttcagttctttcaatttagttaaaacgatcgacatggctggtttcgattcattaatgccttatattagagagattgtgttgagaaaagatactgtaattcgtaaccatgggggtggaaagattcccgatggtatttctggtaataagtgctcggttccggggcacaaacgggaattggtccaaaaagcagagccgctaattgaggaagagccattgaagccatggattaccttgaaaaggaatataaacaacgtgaagtatttgccatcaatggttgatataagtttcaagaaccgatacgtgtatgttgatgttggggctaggagttacggttctagtattggaagctggttcaggaaacagtaccccaaacagaacaagacctttcatgtatatgccatcgaggccgataagactttccatcagcagtatgaatcgaagaagaagacggtcacgctgttgccgtatgcagcatgggttaagaac

SEQ ID NO: 15065 - DNA, 607 bp, Gossypium hirsutum
  Clone ID: LIB3829-019-Q6-K6-H5
aaaatataagaaaaaaatcatacgcaatgagcactgctggtcaggttattcgttgcaaagctgcggtggcatgggaggcggggaagccactatcgatagaagaagtggaagtggcaccaccccaaaagcatgaagtccgtattaagattctcttcactgctttatgtcacactgatgtatactactgggagtgtaagggttacactcctctgtttcctcgtatacttggtcatgaagcctcagggatcgtggagagtgtgggtgagggtgtgaatgatttgaaacctggagatcatgtgctccctatcttcaccggagaatgcaaagaatgtcgccactgtctgtcagaagaaagcaataacatgtgcgaactgcttaggatcaactgcgaccgaggtgttatgcttgctgatgggaaaaccagattttccatcaacggcaagcctatctaccactttgttggaacctcgacctttagccaatatactgtcgtccatgttggccaggttgccaagatcagtccaaccgcccctcttgataaagtctgtcccattagctgtgggatatgtacaggttttggggccactgtgaatgttgctaaacccaa

SEQ ID NO: 15066 - DNA, 592 bp, Gossypium hirsutum
  unsure (1)..(592): unsure at all n locations; Clone ID: LIB3829-019-Q6-K6-H6
gacaaaacatgtgagagaggctttggaacatgaagcatcgtgngagaaaccaatttctacttatgtgaaatcaatcgtgatatggtaattgatgccacatacaaggggaacaaatccagatatataaaccatagttgctgccccaatactgagatgcagaaatggataattgatggtgaaacaaggattggcatatttgcaatgcgagatataaaaaagggggagcatctgacctatgattatcagtttgttcaatttggtgcagatcaagattgtcactgtggtgccgctggctgcaggcaaaaacttggggtcaaacctagcaagtcgaagatgtcatcagatgctacattaaagctagtagcatgccaagtggcagtgtcctctccaacattgaaagctgtgctatttggaaaagaaaatggaggtttgcctgtcggaacttctcagcatgattataatcaacgacagttacgttttcggtgttgcattggtgaagtgataaaaatatctcgtccaataaatgatagttactttggaattattaaacgatttgacaagtattcaaaaaagcacctggtcatgtttgaag

SEQ ID NO: 15067 - DNA, 632 bp, Gossypium hirsutum
  Clone ID: LIB3829-019-Q6-K6-H7
gcgttctattcgacttgcctgacgggcaattctatgcagtaatggactgtttctgtgagaaaacgtggagtcataccccacaattcaagatcggttactgccaacagtgccctgacaaggtcaagtggcccgccgagatgggtcagccacctgcactttacttcaatgctggcatgtttgtgtttgagcccagtcttaccacctatgaaaacctcttggctactcttaaaagcacccctcctaccccatttgccgagcaggactttttgaacatgtactttaaggacatttacaaaccaattcctttggtctacaacctggttctcgccatgttatggcgtcatcccgacaacgtggagcttgacaaagtgaaggttgttcactactgtgcagcgggatcgaagccatggaggtacacagggaaagaagagaacatgcaaagagaagacgtgaagatgttggttcagaaatggtgggatatttacaacgacgagtctcttgattacgaaaaaccaaccattggtgaaggacaggcggcagagccggtgaacatgcagccgttcctggtggcactctcagaagctggtgcagtccaatacgtaacggccccatcagcggcttaataataaaca

SEQ ID NO: 15068 - DNA, 610 bp, Gossypium hirsutum
  Clone ID: LIB3829-019-Q6-K6-H8
ccatttcgctgtgggtctgcttcccattcccaaatccctcatcttcttcctattgattcactcaagatccagagctgccacaaaatttcaccaaaaaaatcatctctttcagacatccccaaaaatcccaaatcgagaaatgttactctctcttgttcaaagcagcttcctttcaccttcaacacccctctgcaaattccattccaacttgaacccactaaaaccctcttttttacttcccaaatccctttcccataaaaagtcgctgtgtttgtcaccaaagtatgccactgctattcgtgcttccatgattgaagctccagtgctttgggctggtcggctttgtatttattatgctcttttgaagtctgggttagctggatctcaggctaacccacttgtttcagggttggaggagaatggtgatagtgttggcgaatctggtgatttgggtttctctaagtggttggacaatatacgagggaaaccagacaaggaagcagctgacaaaagaaagctggttagcaaatggcatccgaccacgaaaggtacacttaaaaggaactacagggtaccttccaaatccgaaggccgacgactacttaaagca

SEQ ID NO: 15069 - DNA, 594 bp, Gossypium hirsutum
  Clone ID: LIB3829-019-Q6-K6-H9
gctgcttagaaacatggttggtcctggtgaggtagacgatgaattagaagacgaggttggatccgagtgtgccaaatacggaactgttacccgagttctgatatttgagataacagagccaaacttcccagccgatgaagccgtcagaatctttattcaattcgagagatcagaggacacaactaaagcattaattgaccttgatggacggttttttgggggtagggtcgttaaagcctcattttatgatgaagagaggtttagtaagaatgagctggctccgatgccgggggaaattccgggattttcttgatgcagtacaaagtccccgatgagatggttgaattagtacaccataaattgaaacatagacaaaacagcattgtttgcatactgctgtgttcatctgttttatggtttgtgtttcattagggttttatgcctttgctttatgaagttaacttgtacttagacctgttgacaggactgggtgggttttcgaaatttgaaagggtttaggtaaaaatgttaaacccgaaaaatgggcttagataaaaaattaggtttatttaaaatatgggctgaacttagttt

SEQ ID NO: 15070 - DNA, 617 bp, Gossypium hirsutum
  Clone ID: LIB3829-020-Q6-K6-A1
ggccttctgactgatccaggagcggaaactactgataacctttcgaagttatttcctcatgtgttcatggcatggatcttcgtgcacttagcgtctgtcttgcagctgtggtttgttcttcagagcagccccctcttcgccctcttggaaatcccagtggagattgggcatctcttattctgaagtctgttcttgatagggcaacaaaactcatgattgattttagagctgctggcaattacaatatggccaatcaatctctttggaaggcctcattcgacgaattctttaaccttcttaccaagtattgcataaacaaatatgatactgttatgcagtccttgtgtatgcaggtcaaaccaaatatggccatcaatgaatcagatgttacaaaagcaattaaaagagaaatgccagttgatcttttacatgcatgtttaccccacattaacgaccagcagaaaaagctgatattggatctctctcagcggtctttggttgtaggacagtcatgatggcagaagtttttgaattcacacattgaagcattatacgagcaaatgatgccatgtgctggaaggaatgcgattagcgataccattgcctcatgcagctac

SEQ ID NO: 15071 - DNA, 615 bp, Gossypium hirsutum
  unsure (1)..(615): unsure at all n locations; Clone ID: LIB3829-020-Q6-K6-A10
gtgctgtggtaatgagggatgctgatgggaaatccagggctttgggtttatcaacttcgagaacgcagatgacgctgctagagccgttgagttcctcaatggaaagaaatttgacgataaggagtggtttgtcgggaaagctcaaaaaaaatctgaaagggaggctgaactgaaacatcgatttgagcagacaatgaaagaggcagcagataaatttcaaggagcaaacttgtatgtcaagaatttggatgatagcataagtgacgaaaagcttaaagagctattctctcaatatggtaccataacatcatgcaaggttatgcgggaccctagtggaataagtaaaggatcagggtttgttgcgttttcgaccccagaagaagcttctagagctcttgcagagatgaatggcaaaatggttgtcaacaaacctctctatgttgcacaagctcaaaggaaggaagataggagagccaggntgcaggctcaggttttctaaatgcgaccacttacaatggcatcttctgttgcaccacgaatgtccgtgtaccccaccttgtggtccanggttttgacagcaaatttttcatggncaaacccctcccattttccccc

SEQ ID NO: 15072 - DNA, 508 bp, Gossypium hirsutum
  unsure (1)..(508): unsure at all n locations; Clone ID: LIB3829-020-Q6-K6-A11
aaatttataacttatcctaaatctccttttccacaggtacgaacaccattcatatcttcctcctgtcgacgtatctccaaaccaaactctacaatctcgacgatggctcactctcattctacccaaaacccagtgattgagcagcagagaatgataattccgaacaagcatggtgaaaaactggtgggattattgcatgaaacagagtctaaagagattgtaatcttatgccatggtttcagatccagaaaggattacaatactatgacgaaccttgccgctgctttagaaatagaaggaatcagtgtcttccgtttcgattttgctggaaacggagaaagtgaaggttcatttcagtatggtaactattaccgagaagctgatgatttacacgctgtaattcaacacttctcaggggaaagtcatgtcgtaagtgcaattcttgggcatagtnaagggggaaatgtggtgcttctttatgcttctaagtntcaagatctccgtgtag

SEQ ID NO: 15073 - DNA, 590 bp, Gossypium hirsutum
  Clone ID: LIB3829-020-Q6-K6-A12
gttctagatcgcgagcggccgctcgcgattagggaaagtgcccatgctacattttatggtggaagcgatgcttctggaacaatgggcggtgcatgtgggtacgggaatctctacagtcaaggctatggcgtgaatacagcagctttaagcactgcactttttaacaatggccttagctgcggtgcttgctttgagattaagtgcgcaaacgaccccagatggtgtcactccggcagcccttccattattatcactgccactaacttttgccctcctaactatgctctcccaaatgacaatggtggctggtgcaaccctccacgccctcactttgaccttgccatgcctatgttcctcaaaatcgccgagtaccgtgctggtattgtccccgtctcttaccgtagagtgccatgccgaaagcaggggggatacgattcaccattaatggattccgttacttcaacttggttttggtcaccaacgtcgcgggtgcaggggatatcgtgaaggtgaaggtgaagggaactaacaccaattggttgagcatgagccgtaactggggtcaaaactggcagtcaaacgccgttttg

SEQ ID NO: 15074 - DNA, 608 bp, Gossypium hirsutum
  Clone ID: LIB3829-020-Q6-K6-A2
atcatctcaatatcctgatgtcaaccatgcaactgttatgactccatctggagaaaagccggttcgcgagcttgttaaggatgatgcatggttgaatggagaattcataaccactgtccaacaacgtggtgctgcaatcatcaaagctaggaaactctcaagtgcactatctgctgctagtgctgcttgtgatcacattcgtgattgggtccttggaactcccgagggtacatgggtttccatgggggtttactctgatggttcatacaatgcaccagctggggtcatctattctttccctgtaacttgtaagaatggagaatggacaattgtccaaggactggcaattgatgaattctcgaggaagaagttggacttgaccggacaggagctgaccgaggagaaggaattggcttactcatgcctctcatgaatgcattcatcatttccataatctgtttggaagaggagtggtttgccttaataggattagctgcagttttgaataaaaaaccgttctagatgaactgttagtgattggtaagcgacgtcctctgatcgagatcttcattatacttgtcacttgttcatggatatttttgatattt

SEQ ID NO: 15075 - DNA, 582 bp, Gossypium hirsutum
  Clone ID: LIB3829-020-Q6-K6-A3
ggcttaaactgtgccgcaatggtttcagcgatgaagctattgccgccttctttgaagcctctggaagttctctaactgaactttccctaaataatattgcctcggtgggactgaacactgctatatcgctttccaaatgttcgagaaaattgttcagtttggacttatcatggtgccggaatttaaccgatgaggcactagggttggttgtagatagttgctcgtcactgaagctgctaaaactcttcggatgtacacagatcaccgacgtgtttctaaaagggcattcgaatccccaggtccagatcattggactgaagatggcaacattattggaatttctcaacgtgtttgaaccccgagaagctccattgcggtattcaccggtcgataatctccactaattagttccagcttgaataacctcagtttgctagcttcagcttcattcattgacatatatacaaaagcaatactgattcattcaaagccttatcagaacataccctacaaaaataattaccatacaccagaccaagctaatctctgtagagatacatacttctcacttctttttggtgt

SEQ ID NO: 15076 - DNA, 497 bp, Gossypium hirsutum
  unsure (1)..(497): unsure at all n locations; Clone ID: LIB3829-020-Q6-K6-A4
ctaagatgtgngtgcttgtacaaaggtacttaagttttcatttgtaaaaggaatccatatagtgccatatgaacttgttgctgcagcacctccaccatgtgaagtcagtgaccgcagtgaggcaattaatgcagcgatttcaacattagcatcttgtagccatggtgttttgcaagcagatcctatgtctaactctgatgattgtagtcacactttcagtaaaagctgcttcactgatggagatcctgtttctcctggcaatactgacaccaaaactatgttttctagttcttacgagcatatggaacagaggaaggattttgttttgaagcagtctcaaaacaaacataaaacttcaacagaaacttttgattcagctgaaccttcttcaactatgnccaggtcagaggaagtgtcccttgaagagttgccaccaactgggtggacatcgcttcattaccttatgggatattctacaccaagcccactgatatatg

SEQ ID NO: 15077 - DNA, 606 bp, Gossypium hirsutum
  Clone ID: LIB3829-020-Q6-K6-A5
gttagcaaactcgtcttcccagtctatagaaacacattgctttccttctcctcctcccatttgcatatttcctcgaaaagaaggaccgaccagccattacactaaattttcttttacagttcttcctcttagctcttgtcgggataacagcaaatcaaggtttctatttgcttggtttggataacacatcaccaacctttgcatctgcaatacaaaactcagtcccagccattacttttctaatggctgctttgcttaggatagaaaaagtgaggcttgatcgaaaagatgggatatcaaaggtaataggaacagccttatgcgtggctggtgcatcagtgataacattataccaaggcccaaccatatacagtccaagaccatcattaaatagacccacaccacctatgtttgtttctttgggtgacgcaaatggaaagaattggacacttggttgtttgtttttgatcggtcattgcttgtcttggtctggttggctagtgttacaagcaccggtgctgaagaagtaccccgctagactctcggttacgtcctatacatgtttctttggtctcattcaggtccttgttattgctgcggtttttg

SEQ ID NO: 15078 - DNA, 527 bp, Gossypium hirsutum
  Clone ID: LIB3829-020-Q6-K6-A6
gcgttcgttttttttttttttttttttctttttttttttttgaaaaagtgtagccattgttgtccaaactaaactattctataatagtaatgtaaaaaagcactgtaaacattaatatttagatacaaaactacaggtaatatggtttactgcaatggcattactgattctaactaagctactggtgccctgttttaacaggctcacggtttcgtgtataagttgtacatggcaatggcaaatgaccaaaagggagaccgagaatacttgtttcatctgtatatcaaagaaagaatcatgccatcaatttgatgccccgagatcgtgatcatctctggatattggcatcatgtcaactttcaatcgaatgttttatctgcagggcagctcgaacaacgtttccccttgtaatgatcccgactagtttgccatcaatatctaccacgggtagtcggcgatatttggtctcgagcaatagcctagcagcatcttccaggtttgttgtttcacgaacaacgagcggtgaa

SEQ ID NO: 15079 - DNA, 524 bp, Gossypium hirsutum
  unsure (1)..(524): unsure at all n locations; Clone ID: LIB3829-020-Q6-K6-A7
cggacgcgtgggcttctctagaggtctggtctactcaacactctctcctccctcttagcaaccaaagactcagatccgctcggatttctttgtcccagaactagaatggagacctttctattcacatcagagtccgtaaacgagggacaccctgacaagctttgcgaccaggtctctgatgctgttctcgatgcctgccttgcccaggaccctgacagcaaggttgcctgtgaaacatgcacgaagactaacatggtcatggtctttggagagattaccaccaaagccaacgtagactatgagaagattgttcgtgatacatgccgctccattggatttgtttctgatgatgttggtcttgatgctgacaattgcaaggtcttggttaacattgagcagnagagccctgatattgcccaaggtgttcacggacactttacaaagcgtccataagagattagagccggtgaccaggtgcatatgagttgngtatggcacttatgaaacccctggaatcatgcctc

SEQ ID NO: 15080 - DNA, 369 bp, Gossypium hirsutum
  Clone ID: LIB3829-020-Q6-K6-A8
ggtggctatcctcttcttcagagtcacagcgaggacatgtgacatttgtaattactcgcttatatctaaggttgactagtgtagggatataatttcaggagatctgccaaattattaatgtaattttttatggtagctataaatcctatagtttcctgtaaaagtctttgatttcgacctgtaataaataactattaggatccaagctagcatattgtaatagtttataggcccttcagacagaaaattctccagaaagttctcctttccacacttgaaaatcttcgtggtctgcttctgtaagaggaatctgcaatatcttttaggcaacttccgtttgaatggtattgttgattaactctattttcc

SEQ ID NO: 15081 - DNA, 587 bp, Gossypium hirsutum
  Clone ID: LIB3829-020-Q6-K6-A9
gtttggtgaaatcgtcgaatcgaagacattaatgatcgtgagactggaagatcccgaggctttggattcgttactttccgtgacgagaaagctatgagggacgcgatcgaaggaatgaacggtcaaaatcttgatggaaggaacataactgtcaacgaagcccaatcgcgcagaagtggaggcggtggcggaggatttggaggaggaaacggtggttacagccgcggtggaggcggcggcggatatggtggtcgccaaggaggatatggtggcggacgccgtgaaggtggatacggaaacggtggggggtatggtggaggtggatacggaggtggacgccgtgaaggaggatacggtgacggcggatctcgttactcaagaggcggcggtgcatctgaaggcaactggaggtcttaaatttagggtttcaaagtgggcttgggcctatattgttatgggtttggtttgggtttggtagttggtaattctaaagttactctgttactgtttggtttgggttctctcgtttttgatcgatgttgttactgttctcttaaaagcataaaaatggaatgaagtatcttctt

SEQ ID NO: 15082 - DNA, 620 bp, Gossypium hirsutum
  Clone ID: LIB3829-020-Q6-K6-B1
ctgaatccttcatcgatacgacatggagtttccgtacatggaagctgttgttggttttatgatattaatgtacttatttgaaacttatctggacttacggcaacatgctgctctcaaattgccaactcttccaaaaacattggaaggagtaatcagccaagagaaatttgaaaagtctcgagcctatagcctcgataagagccacttccattttgttcatgagtttgtgacgatcctgatagattctgcaattttgttctttggtatattgccttggttttggaagaaatcaggaactttcttgcctttacttggtctaaatgaagagaatgaaatattgcacaccctttcatttttggctggtgttatgatatggtcacaaatcactgacctatccttttctctttattcaacttttgtaatcgaggcccgccatggtttcaatcaacaaacaatatggttattctttagggaccttatcaaaggaatatgtcttgctattgtacttggtccaccaattgtttctgctattattgtcatagtacagaatggaggtccatatctggctatctatctttgggcatttatgtttgtcctttctcttgtaatgatgacaattt

SEQ ID NO: 15083 - DNA, 612 bp, Gossypium hirsutum
  Clone ID: LIB3829-020-Q6-K6-B12
ttcacttgtgaaggaagattgatggctaagcaagcaaattttacattttcaaatggtaaacctgtgccttttgaagatcaagtagcagtagctttgagaaggctaagctccggtcaatcactagtgacggttggtgattcgttcgggctccaccactcaactgtctctcagttgacctggcgctttgtggaggctatggaagaaaggggtcttcaccacctgcaatggcctaccactgaagctgaaatgacagtaataaagtcgaaatttgaaaggattctaggtcttcctaattgctgtggtgtgatcgacactactcatgttatgatgtgtttgccttcatcagatcctgctagtaaagtgtggcttgaccacgagaagaatcacagcatggttttgcaggcaatcgtggaccctgaaatgaggttcagggacatagtaaccgggtggccaggtaaaatcaaagactggttggtgtttcagagttcaaatttctacaaactgtgtgataaaggagacaggttgaatggggaaaagctagagctcccggaaggatcggaaataagagaatacataataggggatttaggctatcctttattaccctatctt

SEQ ID NO: 15084 - DNA, 614 bp, Gossypium hirsutum
  Clone ID: LIB3829-020-Q6-K6-B2
ggaggttcgtaagctgcttggaaagcatgctaagaatattattctcatgtcgaaggttgaaaatcaagaaggggtggcaaattttgatgacattcttacaaattcagatgcatttatggtggcgagaggtgacctaggaatggagattccaattgagaagatatttctagcacagaaagtgatggtttacaagtgcaatatccaaggaaaacccgttgtcactgcaacacagatgttggaatccatgataaagtctccccggccaaccagggctgaggccactgacgttgccaatgcagttcttgatggtacagactgtgtgatgttaagtggtgaaactgcagctggagcttacccggaacttgcagttcgaaccatggccaaaatatgcttagaagcagaaagcacacttgattatggagatgtcttcaaaaggattatggaacactcaccggttccaatgagtccattggaaagcctggcttcttcagctgttagaacagcaaattcagcaaaagcagctcttatattggtcttaaccaggggaggaagtaccgcaaaattggtggctaagtacagacctggcatacccattttatccgcagttgtccctg

SEQ ID NO: 15085 - DNA, 596 bp, Gossypium hirsutum
  Clone ID: LIB3829-020-Q6-K6-B3
aaaaatttagggagcacaacttcccccccccccccagtttcgctgttcagtgacaatggcgattgtgaatatggtgatggctgtggttatcatggcagcgaccctcggagggaaattgggtgcagcacaagtacaccatgtggtcggaggtgaccgtgggtgggacctttcctctgacgtggcatcttggtcctccggtaggagcttcagggttggagacaaaatctggttcgcctacgccgcagcacaggagagcattgctgaggtgaatagcccggaagaatatgagtcgtgcgatgtgagcaaccccataagaatgtacacggacggcatagatggcatcccgctggatggggaagggatccgttatttcgtaagcggcaaggaagagagctgcaagaacggtctaaagctacatgtggaggtgatgccttttgggaaccccgagcccgaaaagcccagagttgcagtggctgctgcagcgcccaccactccttctggatcagcccggctttacggaagctccgtgttattattggttgggttatggctttgccatatggctatttaattgtaccagttatgacctctctgca

SEQ ID NO: 15086 - DNA, 600 bp, Gossypium hirsutum
  Clone ID: LIB3829-020-Q6-K6-B5
ttttctttttgggtatggataattgaagggcaatgttgggaagcgggggggtttcggacgggtacgaggtcggctcaaagagacaaagaatgatggaatcaactccctacttcgcagtgaacagcggtatgggcggctatcaaccttacgggtatggtggtggctaccaacctccttcctttccggtagtacgtcttagggggcttcctttcaactgcactgatatcgacattttcaagttctttgccggattggacattgtcgacgttttgctagtcaacaagaatggaaggttctccggagaagcctttgttctctttgccgggtcaatgcaggttgagtttgctttgcaaagggatcgacaaaacatgggacgccgctatgtagaagtttttcggtgtaagaggcaagactattaccatgccgtagccgcagaggtgaattacgaaggaatctatgataatgatttccacggaagccccccaccctctcgagcaaagagattcaacgataaggatcaaatggaatacaccgaaatactcaagttgcgtggtctttctttttcggtgaagaagcctgaaatcgttgaattctttgcag

SEQ ID NO: 15087 - DNA, 582 bp, Gossypium hirsutum
  Clone ID: LIB3829-020-Q6-K6-B6
catgtgttagctttgctaaactcaacgcaccgtcatcctcttggatcggtggccagcagtctctccctcaacgctccggatcatccgctcggctcgccactcgcagagtctcactcccgatccgtgctggcgcttacaccgacgaactcatcaaaaccgccaaaactattgcttcacctgggcgtggaatactggcaattgatgaatcgaatgcaacatgtgggaagagattatcttctattggcttagacaatactgaacccaaccgccaggcttacagacagcttctgctcacaactcctggcctcggagaatatatttccggtgccattcttttcgaggaaacactttaccagtcaactacagatgggaagaagtttgttgatgtcttgcacgaccagaaaatcgtacctggcatcaaagtagataagggttcggttcctctacctggatcaaacaatgaatcttggtgccaaggcttggatggattgtcatcaacaactgacgagtactacaaacaaagcgctcggtttgccaagtggagaacagtagttagcattccttgtgggccatctgctctgg

SEQ ID NO: 15088 - DNA, 217 bp, Gossypium hirsutum
  unsure (1)..(217): unsure at all n locations; Clone ID: LIB3829-020-Q6-K6-B8
ccgtccgnatcccggtcgaccccgcgtccgccnattttacacgtgagtgtgtaggcctgggagacgtttagtgttgtgatgtatgaatcacgcagccggacccctacctaaagcaaagactccggctgcgtgnttcgtncgtgntgtcgctgttcgtttttctggcctgtcctctttttgtttttntttgccggccgcgtttttggggggggggggg

SEQ ID NO: 15089 - DNA, 599 bp, Gossypium hirsutum
  Clone ID: LIB3829-020-Q6-K6-B9
gcctttttgagaataggggattctcgaaccttgttgtcgaacggcgagaagaagggcctgtactacctgctaccatgaatgcctttgatcttatctcgacatctcagggtctcaacctcagtagtctgtttgagaagcaaatgggccttgttaaaagggaaacaagattcacatcaaaacgtcctgctaatgagataatctcgcaaatagagagagctgctatgcccttgggttttgatgtgaagaaaaataaccacaagatgaagcttcgtggagagaaaactggacgcaagggtcatttagctgttacaacagaggtttttcaggtggctccttctctttgcatggttgaacttcgaaaatctggaggggataccctggaatttcacaagttctataataatctctccactggactaaaagatattatttgggatacgacctctgaaggaaaatcgggtgaaaacagtgctgcggcaggctcctcataaccgccccgacgacaggtgtttcccaaaatgcgcattggttgctattcaaaggggaattctttttatttatgtacgtttttatgttggtttgttgaatgcttgtaataa

SEQ ID NO: 15090 - DNA, 605 bp, Gossypium hirsutum
  Clone ID: LIB3829-020-Q6-K6-C10
gtctaccaacttggactggtacaagggccctacacttcttgaggctcttgaccagatcaatgagcccaagaggccttcagacaagcctctccgtctaccacttcaggatgtgtacaagattggtggtattggaactgtcccagttggtcgtgttgaaactggtgtcttgaagcctggtatggttgtgacctttggtcctactggtctgaccactgaagttaagtctgttgagatgcaccatgaagctcttacggaggcgcttcctggtgataatgttgggttcaatgttaagaatgtcgctgttaaggatctcaagcgtggttatgttgcatccaactccaaggatgatcctgctaaggaggctgcaaacttcacttctcaggtcatcatcatgaaccatcctggacaaattggaaacggatatgccccagtcctcgactgccacacctcacacattgctgttaagtttgctgaacttttgaccaagattgacaggcgatctggtaaggagcttgagaaggaacccaagttcttgaagaatggtgatgctggtatgattaagatgatttccaccaagcccatgggtgtggagacctttttcgagt

SEQ ID NO: 15091 - DNA, 617 bp, Gossypium hirsutum
  Clone ID: LIB3829-020-Q6-K6-C11
attcaataagacatatattaactcaatataggagtgcattaccaaaacatttgcattcttattgtgcacctatactattagagttctgcaagctactaaggaaggttgttaacgaagatagtttgtatgaggcgtgccggagtgcacttgggatgttgttggaaagtgttggcacttccaggggtttaatgctgccagaggttaaagggttgattgtcatacaagatattttcccctttgttagtgagttggctgataagatatctaagaacttggaatccagtgtagattctaccagtagtggggaaccattatcgagtgatgtgagggatttcacagcattcttgaaccctttgcggtctaccattcttgagagagtggcgttccggattcccatatcagttaagtggaaaaagaaggataatagcaatcctccttatggggaagcagttgagtttcttcatactatatttaatgatttgttgggtaaaatggaaaattgccttatcagagtggaggaaaacttaaccgcaactggaagcagtgaaggtgaatatcttagttcagagtggtctcagtatcttgccattttgaaggactgaatgcatctcaaaact

SEQ ID NO: 15092 - DNA, 589 bp, Gossypium hirsutum
  Clone ID: LIB3829-020-Q6-K6-C12
tatcttcaacctgaatctgaaagatcaactgctcagcccttatcattgggtttaccaactgcgtcgaccttcgaggatgatattaacgatacatggcctgaccaaaatgaaagagatgatttcaatgcaccagaagactcctttgagcaggagaaactgatgtggaagaaaaatgggaagctcgatcaatacggtttctctactgcagggaacaagttacggaagcctaatggtcagacaaaatggaaagaaccagtaagatcagatattaagcattcaaaatcagatgatgatttgaatgctctcctacaggaagaggaggatcttgtaaatgcccataggaaacaagtggaggaaactatgaatattgtcaaagaggagatgaacctgctggttgaagcagatcaacctgggaaccagctggatgattatatatcgagattgaccactattctttctcagaaggctgccggtatcacacagttacaaactcgcttggctaatttccagaggcgcttgaaggaacataatgtgttagtatcttcatccggctattgattacagaattgaagatagaagtcaaaactat

SEQ ID NO: 15093 - DNA, 620 bp, Gossypium hirsutum
  unsure (1)..(620): unsure at all n locations; Clone ID: LIB3829-020-Q6-K6-C2
cttgatgtcaattctgcttattatgatcccaaaactcgatctatgcgtgaagatcctcttcctgatgctgaccctaatgagaagttctatgaaggtgataatcaatatagaatgagtgggcaagctttggagttcaagcagctcaatatccatgcatgggaagcatttgataaaggtcaagatattcatatgcaggctgctccatctcaagctgaactcctcttcaggaattataaggtcatcaaagagaagttgaaatcaaagaccaaagataccattatggaaaaatatggcaatgcagcgactgaagaagagataccgatggagcttctcttggggcaaagtgagaggcaagtcgaatatgatcgtgctggcagagttataaagggaatggaaacatcgcttccaaaaagcaagtatgaagaagatgttttcatcaacaaccacacaagtgtttggggttcatggtggaaggatcgccaatggggctacaaatgttgtaagcaaacaattagaaatagctactgtactggtgcagccnggattgaggctgcagaagcagcaacggatttgatgaaagctaatattgcacgtaaagcaacatctgaagatgcccctgc

SEQ ID NO: 15094 - DNA, 349 bp, Gossypium hirsutum
  Clone ID: LIB3829-020-Q6-K6-C4
cttttgagcttcaacttctttgatgggtgtgaatacataatgttaacagctaaactataaccaaagagtttgttttttgcttagcatggggagagatggaaaaagaaactaaccaagaaaacccatctctcctctcaaataataacatctccatcactaaagaaaactcctcccctaaaaaacaccctggaaacaccgctgcggctggtggcggagataggctgaaacgtgatgaatggagtgaaggagctgtttcaagcttgcttgaggcttacgaaaacaaatgggtgcttagaaatagagccaaactaaagggtcatgattggcaagatgaggctctctatgtttc

SEQ ID NO: 15095 - DNA, 242 bp, Gossypium hirsutum
  Clone ID: LIB3829-020-Q6-K6-C5
ggcggttcttgggcttaggttaaggcgttttaggatttgagtgagcttcggctcttattttagggtttaatgggtttgtttgttagtgtgtggtttctatcgatattttttcttgtatcatcaggagttttaaaacataaaagtggaatgaagtatatgccttcttttcaattcattgcttgtgacctttcttttttatttttatatgatgagtggaaaaataaacaaataagcattccttt

SEQ ID NO: 15096 - DNA, 482 bp, Gossypium hirsutum
  Clone ID: LIB3829-020-Q6-K6-C6
gcaggctctcgtaagaagtaagaggtgtatggaaaaagagtagctcctataatggcagagtactgggagaaggcagagtttccattccaaattgttcccaaacttggtgctcttcatatttctggtggtactatcaagggttatggatgcccaggtctctccctcactggaagtgctattgcaatggcagaggttgctagggttgatgcaagttgctcaacttttatcttggtgcactcatctctagccatgcttacaattgcattgtgtgggtcagaggaacagaagcaaaagtatttaccatcattggcacagttaaaaactgtagcttgctgggctttgactgagcctgactatggaagcgatgctagttctctgaagacaactgcaacaaaggtagaaggaggatggatacttgagggacaaaaacgctggataggaaacagtacttttgcagatgtgttggttatcttttccaggaa

SEQ ID NO: 15097 - DNA, 621 bp, Gossypium hirsutum
  Clone ID: LIB3829-020-Q6-K6-C7
gccgtgcgatccattttcccgctcgccgagtttcccactcgccgttagccggcgatccattttcccgcccctccgccaaatcaggtacttgaagttaggaaattaatggcttatatccagtatggaagacatgcccttcggcaaattatcaaagaaacgaatgtccagcaaagccatgatcgtttgatgcaacctctgttctatgcttgtcaaggaattagatacagaaagttggatgtgattcttacgacgagcattgagaaacttggcaaagctggtgagactgtcaaagtcgctcctggttattttcgcaatcatctgatgccgaaattgcttgctgttcctaatattgataagttcgcttatctcattaaggagcagcgtaagatttatcaaccgaaggaagaagaggttcaagtagttacaaagaatgtggaagataagagcaaagtatatgaaaaggctgcatatcgtctacttaatggccggctggtattgaggagatctatcaatgttgaaaagtttcgtgcccaatcgaccaaaatgacccaattgaattgcgctcacctgtgacaaaagatgaaattggtgctgaggtttcaagggagctttgcgttcaaa

SEQ ID NO: 15098 - DNA, 613 bp, Gossypium hirsutum
  unsure (1)..(613): unsure at all n locations; Clone ID: LIB3829-020-Q6-K6-C8
aaagattgaaaatttacaagctctgactcgagcaatccgtaatgctagagccgagtattctgttgagccagcaaagcgcataactgcttctattgttggtagtgaagaagtcattcagtatatatctgaagagaaggaggtgttggctctcttatccaagctagatttagacaatattcatttcgctgattctcctccagaggatgcaaaacaatcagttcacgttattgcaagtgaaggactggaggcatatcttccccttgctgatatggttgatatttctgctgaagtgctacgccttaccaagcgcctatcaaagatgcaaacggagtatgagggacttaaagctcgcctcaactctcctaaattcatagagaaagctcccaatgatgttgtccgtggggttcaggaaaaagcagcagaagcagaagagaagattaatctgaccaaaaaccgattggctttcctgaaatcaactgttatgctttcgtaataggctccatatttggtcatattttcagtcttagcaaagctacacgtcctgttgggatgatctgcactgtttacttatttatgtcactataaactncatttcagctgttctgcacattca

SEQ ID NO: 15099 - DNA, 592 bp, Gossypium hirsutum
  Clone ID: LIB3829-020-Q6-K6-C9
gcgttcggaaaataggagtaactgaagaagagcagatattcgtcaaaccctaacagggaagactattactctcgaggttgaaagcagcgataccatcgacaatgtcaaggccaagattcaggataaagaaggcatccctcctgatcagcagaggttgatttttgctggtaagcaactggaagatggccgaaccctagctgattataacatccaaaaggagtccactcttcacctagttttaaggcttaggggtggaaccatgatcaaggtgaagactctcaccgggaaagaaattgaaattgacattgaaccaactgataccattgatcgtatcaaggaacgggttgaagagaaagaaggaattcctccagttcagcaaaggcttatatacgccgggaagcaacttgcagatgacaagacagcgcgggactacaatattgagggtggctctgtgctgcatcttgtgcttgcactgcggggtggctgtctgtagatggtgcaatacgaaaaaaatacctggacagaaacttttgcaatttcaattattgcataaatctaatgagttcgcatttgatttgttgagaaatgcatg

SEQ ID NO: 15100 - DNA, 172 bp, Gossypium hirsutum
  unsure (1)..(172): unsure at all n locations; Clone ID: LIB3829-020-Q6-K6-D1
ataagttgctacaagnactaaggcttactctgtttaatatgtggcttcaacaaaatggtaggtttccctgtaaatgctgtcactaaactattgttcattctgtaaactcctcgagttttggttgttaagtatcaaataaaaaaggctgcttaagtagctgaacttgcaaccc

SEQ ID NO: 15101 - DNA, 443 bp, Gossypium hirsutum
  Clone ID: LIB3829-020-Q6-K6-D10
ggcatcaacatttattggcaattcaacatccatacaggagatgttcaggcgtgtgagtgagcagttcacagctatgtttaggaggaaggccttcttgcattggtacacaggggaaggcatggatgagatggagttcactgaagctgagagcaacatgaatgatctggtctccgagtatcagcagtaccaagatgcaacagctgatgatgaagagtacgaagaagaagaagaggaacgcgaatatgaggactaaggagaaggaaagatattgccattttggcaattcaaaatctcaactcccagttgctggtgctttttttttttcctgttttggatgtgaaagaattagccatttacttttgctgtaacaactgttgcatttctggatatttgcagacttgtgtatctttctttctttaaagtttctttctaaatattgtctt

SEQ ID NO: 15102 - DNA, 614 bp, Gossypium hirsutum
  Clone ID: LIB3829-020-Q6-K6-D11
gtgctcatcttcatagtttaaagtaaacggaaaaaaaaagggttttctgtgtatttatggtagcaatctgattgctgattttggaagtatcactgccttgcaggttccgaattcagagtgaagaaaaaaaatagagtttttatttccattttgaaaagcgtggtttgtttgttgctgatccttagaaacattgtctgaggattgagctacagtgggttttttctggagaaaaaaataaaagagagaattttggggggtacctgaatcttaaaaaggttggttcaatagtccttcaacttgttttagtttgctttctttgatccttagaaaaaaaaaggtggtttttcatttttgttcctttttcggcttgctgggtgccatagtccaatttcacttgattagctgaagtgatcattttgataaaaaattcatatctaaaatcatgagagaaggtaccgaaaacggggtttccgatgagaatcggtcggccgaggattggttatcgcacgcgcaaaagcttcttccgatggcagttgataaggcaagggaagtgaaaggggttcccggtaggtggaaggtgataatatcgaaactggagcgaatcccttcgtgct

SEQ ID NO: 15103 - DNA, 447 bp, Gossypium hirsutum
  unsure (1)..(447): unsure at all n locations; Clone ID: LIB3829-020-Q6-K6-D12
gtgaacggcagnaagggctccaacatttcatgcatccagccggaacataaaacttcaaaactgatgtaagactcagtatctcctagtcgacacaggacacaaaggaaagtactatcgttggataaccaccaccgatctgagcctgtctcaacggcacgtaagtctcaggccagcctctcttgctcctttattctatgaatattagctgtttgtgaaaatgcgtttgttatatgtacatgtaaacatgtttgatagtaaaagatgaagactttaaggtgaaaaagaccataaaagggtgctagtggggggaaaagtaccgatagaaatggcccaaaaataggctttagattggttcttgtgttttttagttattgtggtagctgacttcaaatggcagacaatttattgttactgttagtgtgcaaagtaatattattactcttttct

SEQ ID NO: 15104 - DNA, 604 bp, Gossypium hirsutum
  unsure (1)..(604): unsure at all n locations; Clone ID: LIB3829-020-Q6-K6-D2
gtttctgacatccgaaaaagatggtgaccgtgngaagaagttcgtaaggctcaacgtgcccaaggccctgccaccgtgttggccatcggcacatcaaccccgcctaattgtgttgatcagagcacataccctgactactatttccgtatcacaaatagtgagcacaagaccgagttgaaagagaagttcaagcgcatgtgtgaaaaatcgatgatcaagaagcgatacatgtaccttacagaagagattttgaaagagaatcccaatgtatgtgaatacatggctccttcactggatgctaggcaagatatggtggtagttgaggtgccaaagctaggcaaagaagcagccaccaaggccattaaggagtggggccagcccaagtccaagatcacccaccttgtcttttgcaccactagtggtgtggacatgcctggggctgactaccagctcaccaagcttttgggcctccgcccctccgttaagcgcctcatgatgtaccaacaaggttgcttcgcaggggggacggtgctccgagtggctaaggacttagctgagaacacaaagtgctcgtgtacttgttgtgtgctcggagattactgct

SEQ ID NO: 15105 - DNA, 573 bp, Gossypium hirsutum
  Clone ID: LIB3829-020-Q6-K6-D3
cggccgcgtgggttgctttcaagcaatctaaaccttattttctcatcaaatcgctttgacatatggctcgtaccaagcaaactgctagaaaacaaccggtgggaaggctccacgtaagcagctagccactaaagctgctcggaagtcagcaccggcgaccggaggagtgaagaagcctcaccgtttcagaccaggaactgtggctcttagggaaatcaggaagtaccagaagagcaccgagctcttgatccgaaagcttccattccagaggcttgtgagagaaatcgctcaagattttaagactgatttgagattccaaagcagtgccgttgccgctcttcaagaggctgctgaagcttaccttgtcggactgttcgaggatactaatctgtgtgctattcatgctaagagggttaccattatgcctaaagatatccaacttgctaggaggattagaggagagagagcttaggtctgttagtttttagttgattgattcctagaattagaaatctgtactttctgttcattttgttgtatttgcagtctctgcaaatcattaatgaaattctg

SEQ ID NO: 15106 - DNA, 576 bp, Gossypium hirsutum
  unsure (1)..(576): unsure at all n locations; Clone ID: LIB3829-020-Q6-K6-D4
gcgantggggaagtagcggtgggtgcggcggccgtgtgtgccgcggccgtgtgtgccgcggcggcgttggtggtacatcaccggatgaagagttcggggaagtgggcccaggctcaatctatactgaaagatttcgaggaaaagtgcggcacgccgatttcgaagctgaaacaggtggcggatgctatgaccgtcgagatgcacgccgggctcgcatcggaaggcgggagcaagctcaaaatgatcatcagctacgtcgataatctccccactggtgatgagaaagggctgttttatgcgctcgacctcggtggcaccaatttccgtgtgctacgtgtacacttgggtggtaaagaacaccatgtcgttaagcaggaattcgaggaagtatcgattcctcctcatttgatgaccggatcttctgacgcattatttgattatattgccgaagctcttgcnnaatttgttgcttctgaaagtgaaggtttacatttttctcccgtttgacaaagggagctgggggttacgttctcctttcctgttcggcgaacatcgttttcgtctgggacttcttat

SEQ ID NO: 15107 - DNA, 579 bp, Gossypium hirsutum
  unsure (1)..(579): unsure at all n locations; Clone ID: LIB3829-020-Q6-K6-D5
gngagaggcttggcaggatactgggatgcttgcggaggctgtgctccatgcacatgctcatgggcgacccacactgaagaacttggttgaggcttggaacaaagtgttgcagaaggaggtggagcacaccccatcagcaaaaacagatgctacggctgcatttttggcttctcttgaggagcccaaacttacaagcttgtcagaggcagggaagaaacctcctattgaaatccttcctcctggtatgtcagcactctcagcttcaattacagttaaaaagaaacctgctccggtgactcagacttcacagccacaaagcaaaccattggcattagaagcacctcctactggaccagcttctgctgcagtacctggcacaccaataggagcacctccttctgatgcaccagatgcaacacctggtacgccaataggagcagcaactnctgatgcaccagctgtggcagcaacaggtgcagcacccgcatccgaagcaagtgaacctgctctagtagaagaagctcctaattcatcaacagggagcaatccctgatctgattgcttttgtacaaatgaacc

SEQ ID NO: 15108 - DNA, 585 bp, Gossypium hirsutum
  Clone ID: LIB3829-020-Q6-K6-D6
tcggccgtagtgcgccgttcgcatcaggaagaatggcggtccctttgctgtctaagaagattgtgaagaagcgtgtcaagaagttcaagaggccccaaagtgaccgcaagatctccgtcaagacaaactggcgaaggcctaaaggtattgactcccgtgttaggaggaagttcaagggatgcactttgatgcccaatattggttatgggtccgacaagaagactcgccactatcttcccaatgggtttaagaaatttgtcgtgcataacgtccaagagctggagcttctcatgatgcacaacaggacatactgtgctgagatagctcatgatgtttcaacaaagaagaggaaggaaattgtcgagcgggcagcacagttggatgttgttgtgaccaacaaattggctaggttgcgcagccaggaggatgagtgaacatctctccctgatggtcgattttgctttttggtgtaatatttttatttaccatttaggggttttcttttcctgcaattcggatcaaatgaatttaagttttattttgactctttttttggtcgttgctattgaatctaaactcgttata

SEQ ID NO: 15109 - DNA, 594 bp, Gossypium hirsutum
  Clone ID: LIB3829-020-Q6-K6-D7
gtcccaccacgcttcactcgctatgtacggacaaccaacattcccgcgctcttcctccgagtttctcaccgactcactgacgtctcccgacgtggtgtcgttgcctttaaactttccgttaagtccgcagactcaactcactgtagccaagtcggtggagtcggtgagcgacgtgattcacagtggcagcagtagcagcgggagtttcaactcgccgacttcgctagcgagttgctgcacacataaaccgagtttcattagaagcttcagtagccattcccttccaaagaatgaattccactgtcgttttgcctcaagccttaacgacttcattgactctgattctgctccggtgaggagagttttcagtaccggtgatctgcaccaggtgcagcagagtggtaggaaggcagagagtccattgtcaaatgagagtagtgcaatcattgaaggaatgagcagagcctgccgctacagtcccgaagaaaagaaacagaggattcaaagatacagaaccaaaagaaaactcatgaacttcaacaagaagattaagtatgcatgtaggaaaacattggcagacaggatgccacggat

SEQ ID NO: 15110 - DNA, 554 bp, Gossypium hirsutum
  Clone ID: LIB3829-020-Q6-K6-D8
aaaagagcagatcttcgtcaagactctaaccggcaagacgatcactctcgaggtcgagagctccgacacgatcgacaacgtgaagaccaaaatccaagataaggaaggcatccctccagaccagcagcgtctgatcttcgccggaaaacagcttgaggacggccggaccttggccgattacaacatccaaaaggagtcaactctccacctcgtcctccgtttgcgcggtgggatgcaaatcttcgtgaaaaccttgaccggcaagacaatcactctcgaggtcgagagctccgacacgatcgacaacgttaaggcgaagatccaagacaaggaaggcatccccccagaccagcaacgtctcatcttcgccggaaaacaacttgaagacggccgtaccttggccgactacaacatccagaaggagtcaacgctccatcttgtccttcgtttgcgtggcgggatgcaaatcttcgttaagacgcttacgggaaagacgatcactctcgaggtcgagagctctgacacgatcgacaacgtgaaagccaaaatccaag

SEQ ID NO: 15111 - DNA, 583 bp, Gossypium hirsutum
  Clone ID: LIB3829-020-Q6-K6-D9
gcttcgcttcagtcttccatcgatatccaactcgttggagatgatttgttagtcacaaatccaaagaggatatcggaagctattcaaaagaaggcttgcaatgccttgcttcttaaggttaaccagattggaacagttaccgaatctattcaagcagcacttgactcaaaagctgcaggatggggagtgatggtcagccaccgaagtggtgaaacagaggataacttcatcgctgacctttctgttggtttagctagtggccagatcaagactggagctccttgtagaagtgagaggttggccaagtacaaccagcttcttcgcattgaagacgaactcggaaatgtctgctatgctggtgaagctttcagatctccttagagggttaacttacaggaacaagtttctgcaccaaattagtatggagaaacgttttaacgagctctagtaaactgaggccgacctatagaaattttcaggaaccctaagagcttctcaagggaaaaaaacataatttgatcaactaggatagatttcagtttgtgggatctgaataatcaagttttggtataagttgtatttg

SEQ ID NO: 15112 - DNA, 584 bp, Gossypium hirsutum
  unsure (1)..(584): unsure at all n locations; Clone ID: LIB3829-020-Q6-K6-E1
tcggggaccttgagtgggaacccattggcaatgacagctgggatacagacccttaagcggttgaaagcaccgggaacatatgaatacttagataggatcactagagaacttgttcaaggcattctaaatgctggaaagaagacagggcatgcaatttgcggagggcatattagagggatgtgtgggtttttcttcacagaagggcctgttcacaactttgatgatgcaaagaagagtgatgcagcaaaatttgtcaggttttaccaaggaatgctgcgcgaaggtgtttactttgctccttcacaatttgaagctggatttacaagcttggcacattctcctgaagacatccagaagacagttgcagctgctgagaacgttcttagcaagatttaaggtatctattgcagtgtctttgattacattntcacagtttgaagctggatttacaagcttggcaagtcgtatgagtacttccgagaaatactagtcttgcaatcatgttcttagtcctgcccttttgttcttgcttttgtctttgcatgattgagctctttgcacgcgagttatgggtcattagataa

SEQ ID NO: 15113 - DNA, 584 bp, Gossypium hirsutum
  unsure (1)..(584): unsure at all n locations; Clone ID: LIB3829-020-Q6-K6-E10
ggaactttcccatgnagctttgttagatgaaagcaagattcatgggcaaactgttgtaagaatatgttatttatttgcaaaattgtgctctgtactgaagatcacccctggttctatccagtctagtgatggaaaagtccttgatgggtatgcaaatgccttcagatcatgttctggaaattctgtagaatcacttgacgggggtatcagaatttggacaaatagcccaagaaaagtagattgcaaggatttagttttcttggtggggattcaggaacaggccgtctgctggaatgcttaagagcctgcttcaagggtccattgatgttttctctgaagaatttgatgtctgtttagttgataagagctgtgccattgtggttttctttcatcctaatttatctcaagctttcctggatgtaatgaatagtgaagaaatcagtggatcattaaaggaattggtctcagaaggcttaagggcagcagattatgacacatacaagagggcctgtagtttgggtttatgggagacagatttagcaagttccttagacaaagcctctgcaactcctgatcacttatct

SEQ ID NO: 15114 - DNA, 628 bp, Gossypium hirsutum
  Clone ID: LIB3829-020-Q6-K6-E11
cccacgcgtccgcggacgcgtgggcgtatggctcaagcaggtgctgtaaaatacctcgtccagttaatggaccctgatagtgggatggttgacaaggcagttgcccttctctcaaacctgtcgacagttgcggaagggcgtgtggcaattgtacgagaaggtggtgtcccattactagttgaaattcttgaatcaggatcacagaggggtaaggagaatgctgcatctgtattgctgcaactatgccttaatagtcccaagttctgtaccctggttttgcaagaaggggctgtgccaccccttgtcgcattgtcccagtctggcacgccaagagcaaaagaaaaggcacagcagcttctcagtcacttccggaatcagagagaaggtgccactgggaagagcaagtaaaagctgactaactttgttatatttttcttgtatgattttttgatatcgtactccatgtaagttgttctatctcaattggtccttttggagctcacttttcatacattctttagtcatccagctatatgcatttagatatgaactctatttttttaataccctttttaaatatggttaggatatggggaaataggttataaccattccgatgaggtggggg

SEQ ID NO: 15115 - DNA, 609 bp, Gossypium hirsutum
  unsure (1)..(609): unsure at all n locations; Clone ID: LIB3829-020-Q6-K6-E12
gcgttcgctcaacaaaatgactgctcaggccgacaaanagatcgaagagattctggcagcccatctcgaccaacaaaaaatcgattccgagaaaccagagcaacctgttgttgaagatgacgacgaggaagatgacgatgacgatgatgatgaagatgatgccgaaggtcatcatgagggagaaggagatggaactgttaggtcaaagcaaagccgaagtgaaaagaagagtcgcaaagctatgttgaagcttgggatgaaaccgatctctggtgtcagccgggtcactgtgaagaagagcaagaatatcttatttgtcatctcaaaaccagacgtgttcaagagcccagcatcagatacttatgtaatatttggagaggctaagattgaggacttaagctcacaactgcagagtcaagctgcagagcaattcaaggctcctgatctaagccatgtgatatcgaaaccggagtcatcaacagcagtccaggacgatgaagaagtggatgacancaggggtggagcccaaggacattgaattagttatgacacaagcaggagtgtccaggtcaaaggctgtcaaggcactcaaggctgctgatggtgaca

SEQ ID NO: 15116 - DNA, 603 bp, Gossypium hirsutum
  unsure (1)..(603): unsure at all n locations; Clone ID: LIB3829-020-Q6-K6-E2
gaaaaatataaaagaaaaaaatgcacccattgtcttcaattcgacagcttcgccattcttctacttcagtattgcttcaacgctttagcatcttcaattgggtgtttcgagcttcttccaaccgccctgcttttctcggaggttcaaagagtttcagtgctggtgcacattcttctgagaatgttggaactccggagaagaattttgatcaacagacaatgaaggataatgtctctgctacacgtgcttcaactttccagaaattttttggtcctttaggtgcacaatctactggtcaaacagatttcaggtcaggcgggaattacaggtctatggatgttttgagggaagcaatagatgcagatagaatggcaaactttaggggttctcaatttcggcaagaccatatcgagcaaaacaaacattttgcacacataaagatcatgcgcaacaatacctttgtcaccgtgacggattccgatggaaataaaaaatgtggagcctcggctggaatgtcaggacttttaggaggcacgaaagtatctaagtatgctactgaagcagtggcagaatatgcntggcgcaaggcaaggaaaatgggga

SEQ ID NO: 15117 - DNA, 599 bp, Gossypium hirsutum
  Clone ID: LIB3829-020-Q6-K6-E3
cttaactccagtgatactggggattacgagtctctctctgttcaatggggtgatcaatatgattatgaggctgtccgaaaaggtggatggtgaaaatacagtgaggttctatagggcgtaaatggcaacaacaatgagcgttgattaataaagatcctcaagcctgtcatgaaaaataagattaattagggagtattaaaatccttcaaaatctatcaggtggcccagaatattgataaacttcttgatgtctgaaagagatcaatactcaaaaacaccaagcttgatatttgattctgtcaacagttcaaatttcaaggatctctacccaactctgactgactatgacattcgctactatatatatgaacttctcaaggccttagattactgtcattcacaaggaatactgcatagagatgtcaagcctcacaatgtcattatatatcatgagctgcacagacttctgttgatagactgactacttgctgaattttaccatcctggccaagagtataatgttcgtgtatcttctacagactctaaacggcctgaccttctggtagatatgcaggactacgattattccttggacatgt

SEQ ID NO: 15118 - DNA, 236 bp, Gossypium hirsutum
  Clone ID: LIB3829-020-Q6-K6-E4
ctccggtgacgggatcttgtttgaccaaggcgctagaactgctcttgccttcgttacgttacgcgccgacggagagcgtgagttcatgttctataggaatcctagcgccgatatgctgttgaagccggaggagttgaaccttgatcttatcagatcttccaaggtatttcactatggatcaataagtttgatcgtggagccatgcagatcagctcatttaaaggcaatggaagtag

SEQ ID NO: 15119 - DNA, 617 bp, Gossypium hirsutum
  unsure (1)..(617): unsure at all n locations; Clone ID: LIB3829-020-Q6-K6-E5
caaacacccactgaactcagtttccatctgcattttttttcttttcttcaatttctacacttcgattctctggaatataaaatcaaattaatttagttttctagaaatggaaaggaaaaatatgaaaagtaaaagaaagaggataataatcaattgaattttccaccaaatttgttcgacggatttttctgagggtttccatcagaattccaacatccaaacagaacccagaaactggctcgtctttggattagtctttatcgtttggtgaattagctaattcagaatgcaggcatcaacacatttaatcaaaggaaatttagaggttaagatttcaaaacggagagatctgccttgttttcgtgaatttaaggaacggaagtcaactttgactcgtaatctttgcatccgaaggggttctatttgcagtggtttaagctctggtgccgtttcaatgggagctgagctcgcacgtgctagagataatgttgaaaccgtcgctcgctctttgatcaaatttcgatctgtcaaaggtggagatgttgaggatctggcaccaatcaaccctcacgagacatctnactggacagttttaccatttgttggcgttgcttgct

SEQ ID NO: 15120 - DNA, 599 bp, Gossypium hirsutum
  Clone ID: LIB3829-020-Q6-K6-E6
aaataaataaattaaatcttgatatagttgctctgcttttgcttctcttatactgagttccaagcaaaaccctttttttgtttttcgcctgattccgctgttatggcttctcaatcttctaagggatcagttcatgatttcactgttaaggatgcaagagggaatgatgttgatttaagtatttacaagggcaaggttttgttgattgtcaatgttgcatcacaatgtggcttgaccaattccaactacactgagctaagtaaattgtatgagcaatataaagatcaaggttttgagattcttgcattcccatgtaaccagtttggaggacaggagccagggaacaatgagcaaatcttagagtttgcttgcactcgctttaaagctgaataccccatatttgataaggttgatgtgaatggtgagaaggctgctcccgtatacaaattcctcaagtctagtaaaggtggactttttggggacagcatcaagtggaatttttccaagttcttggtcgataaggagggccatgtcttcgatcgttatgctcccactacttctcctcttagcattgagaaggatattaagaaactgctggc

SEQ ID NO: 15121 - DNA, 600 bp, Gossypium hirsutum
  unsure (1)..(600): unsure at all n locations; Clone ID: LIB3829-020-Q6-K6-E7
ccagtatataanngttcacctgaaaccccaagcgctggtatctccgtcatttggcgtctccaatctctacctctccttatctcatccaaaggtgtgttaactgggttagcaaaatgtcaaaccccaaagttttctttgatattttgattggaaaagcaaaagctggccgagttgtaatggagctatttgctgatgttgtaccaaaaactgctgaaaatttccgtgccctctgtactggggagaaaggtgttggacagtgtgggaagccgttgcactataaaggctcagcatttcaccgaatcatcccgagcttcatgtgtcaaggtggagatttcacaagggggaatggcacgggtggagaatctatctatggcatgaaatttgcggatgaaaacttcaacctcaaacacactggacctggttgtctatcaatggcaaatgctggaccaaacaccaacggttctcagttctttatatgcactgagaagaccccatggctggatggaaaacatgttgtctttggtaaagtagtggatggttatagcgttgtgaaggaaatggaaaaagtggctcaaaaagcgggaggcctttgaacctgtt

SEQ ID NO: 15122 - DNA, 626 bp, Gossypium hirsutum
  unsure (1)..(626): unsure at all n locations; Clone ID: LIB3829-020-Q6-K6-E8
gcttagtccaactccacacccaccaccattggctgtttgtgatcatccgaaaaagaatggtgaccgtggaagaagttcgtaaggctcaacgtgcccaaggccctgccaccgtgttggccatcggcacatcaaccccgcctaattgtgttgatcagagcacataccctgactactatttccgtatcacaaatagtgagcacaaaaccgagttgaaagagaagttcaagcgcatgtgtgaaaaatcgatgatcaagaagcgatacatgtaccttacagaagagattttgaaagagaatcccaatgtatgtgaatacatggctccttcactggacgctaggcaagatatggtggtagttgaggtgccaaagctaggcaaagaagcagccaccaaggccattaaggagtggggccagcccaagtccaagatcacccaccttgtcttttgcaccactagcggtgtggacatgcctggggctgactaccagctcaccaagcttttaggcctccgcccctccgttaagcgcctcatgatgtaccaacaaggttgcttcgcaggggggacggtgctccgagtggctaangacttagctgagaacaacnaggtgctcgtgtacttgttgtgtgct

SEQ ID NO: 15123 - DNA, 600 bp, Gossypium hirsutum
  Clone ID: LIB3829-020-Q6-K6-E9
gttaaacccaatgggatctgaaaattaagtaaaaccatccttcttgttgttcaatgggaaaaaaaagctaaaggcatagcttgggtaggcaacctctatcagaaatttgaagctatgtgtatggaggtggatgatatggtctgccaggaaacattgcaatatgttgaaaaccagttgcagacagttggttctaatgttaaacagttctgcactgaactaatgcaagacttggtcgcttcatctaccgattcgttagaagaccttaacacagtgcaaatttccggcgttgcagcctctgaggactcgaatggaagtgccaatgaagatcactctcagaccaaactggtctattcctcttctgtaaaatctgttgaggatgtacatttaggcttgccttcagaacaattcacagaggaccaaaattccttggctcattctaaagggttcacagcacctgcttccctaattttctctaaagctttcaagaatgaacttaaggacaatgattctactgcagatgacacatcgttagagtcgatagaaccagaagtgaaaatgggaccagcatgtttattagaggctagccataaatctgttttg

SEQ ID NO: 15124 - DNA, 596 bp, Gossypium hirsutum
  unsure (1)..(596): unsure at all n locations; Clone ID: LIB3829-020-Q6-K6-F1
cggncgcgtgggttcgatttcatgtaaatctgcatcatttaaaattttttttcagaaaataaaaccctctttcgctctatcgtagcagttttatttatttacttgtaatttattttcaattagaaaattaaacatgacgaagaagagaaaatccgacgcctcgcgccttgacgaggttgatcggaccatgtacaccagtttttgcagcgctgcaaactccctctcccagctttacacccaggctatgaaccaccaacgcctttcttttcaggccggtgaacgtcacgcgctggagaaactctatcaatggattctgaggcagcaagaagaagggtcaagggctacaactgttgatatagttgcttatttgcagaatgagcttgaatatggaggagatgagccaccgatgtcccctaggctgccgctgcaacacccacattcccaggctccaatgcagtcgaacaatttaggtgcccctgttctgtccaatccattgtcatcggtaaatgttgggcagggagttcggcctggtgataaccaagttaagaactctgttttctcgaacgccctctcaagcccagttcgccggagccttt

SEQ ID NO: 15125 - DNA, 601 bp, Gossypium hirsutum
  unsure (1)..(601): unsure at all n locations; Clone ID: LIB3829-020-Q6-K6-F10
ccccgcgtccggtttgtctcagatctcagaagaggcccgtaccaagcaaaccgcccgtaagtcgactggtgggaaggctcctaggaagcaacttgctaccaaggccgcccgtaaatctgccccaaccactggtggtgtgaagaagcctcatcgataccgtcctggaactgttgctcttcgtgaaattcgaaagtaccagaagagtactgagcttcttatcaggaaattgcctttccagaggcttgttcgtgaaattgcccaggatttcaagactgatttgcgtttccagagccatgccgttcttgctcttcaggaagctgcagaagcataccttgtgggtctctttgaagacaccaacctgtgtgcgatccacgccaagcgtgttactataatgcccaaggacattcagttggctcgtaggatcaggggcgagcgtgcttaatttccaagtgtgttaatcacacacttagaatggagaaactattgtttgttgttaggcaaatgtgttgnactatttttttatgtttatttttaatcctcttttaggacaagattaaatgataggtttatcttagtgcgtaagttccaatgttatgatgaa

SEQ ID NO: 15126 - DNA, 598 bp, Gossypium hirsutum
  Clone ID: LIB3829-020-Q6-K6-F11
gcgttttgcaactctccttgttcttttggtgtgattctccaccatatctactaaaaaagattgaaagcttaagctcaatacaccatggttttctcttctgttccatatctagatcccccaaattggcaacaggcaccaagtcatcatcatcagcaagctggggttatcactagtgagagtcatgcatgatgattctcagcttccaccaccaccgccgccgccgccagtaccgggtgttggcggtggtggtattaggcctggttcgatgacggaacgagctaggctagctaaaataccacaacctgaatcagctctaaagtgtcctcgttgtgaatcaaccaacactaagttttgttatttcaacaattacagcctttctcagcctcgtcacttttgtaagacttgtagacggtactggacacgcggcggagctttaaggaacgtaccggtcggcggtggttgccggagaaacaaaagaagcaaaggaaataatagatcaaagtctccatcagttgttgccgaacggcaacatggttcaagttcatcttcaagtacgcttgtttctaatagttgcactgatatattaacccacatgaac

SEQ ID NO: 15127 - DNA, 607 bp, Gossypium hirsutum
  Clone ID: LIB3829-020-Q6-K6-F12
cggccgcgtgggcggacgcgtggggcgttatctagtgggccgtgttggtcctgctgctcataggtcttataggtgcatcgttcgttatggataccgagatgtacaccaggatattgattcttttgaaacggagctagttgccagactggctgatttcatccgctatgattggcatcggacccagcacactagtccttatgccgaagatgatgcttcccactctaatgaatcatcaagtgaacgtagattagcagtaatagggacagtagcattttctggcacacgaggttatggaattgaggaaagtgtggaaccagcaagtgtatctattggattctcaacggtagagagtgtgacggatgtgattgagatgcaggctatgggtgcgggagctgttgaaaggagagttagatttgcgattgatgatgatgactccgaatctgatgtgcaaaccaaaatgtatgttcagttggaagaagagctgagggatctgatgacagcccaagaagcagggactgcattcatactaggacacacacatgtggaagcaaagcaaggatcttcaattttaaagagattggccattaattttgggtacaatttcttg

SEQ ID NO: 15128 - DNA, 603 bp, Gossypium hirsutum
  Clone ID: LIB3829-020-Q6-K6-F2
tttgtgtggatcacaaaggtcttttctcgatgtcttgagaactttgaaagactgcaatatcaagatagcttatggtcgattctcattgaactccaaggttatcgtgatctagacttatttattcagcaaaatgatgggaaaaagattgtggatcccgataagcaagacggattatgttctcgtttgaggatggaaatgcttcatccattgcgtgttatcatttcgaaccgagggccagatactgaacttctggttgctaatccggttgagttatctggaaagggaagaccaagggttttctatgatgttacacaagctttaaagtctcttggaatttgcatattctcggcagaaatcggaagacattcaagttcggaacgggaatgggaagtgtacaggttccttttggatgataactgcaaattcaaattctcaagtattggaggtagaaatcagattgtagatagagttagaagattactcatgggatggtaagaatggtcttcttctttgtatcttatgattcctagcatcacctgggtgtccaaacccgaccgagaccacaagcgcaaagttccgatccgcgtttgtattttgacgcat

SEQ ID NO: 15129 - DNA, 591 bp, Gossypium hirsutum
  unsure (1)..(591): unsure at all n locations; Clone ID: LIB3829-020-Q6-K6-F3
gtcacaaccaccacccacaanagcttgaggggtcctagggctggtatgattttctaccgcaagggaccaaagccaccaaagaagggccaacctgaagatgcagtgtatgactttgaagacaagatcaactttgcagttttcccttcccttcagggtggtcctcacaatcaccagattggtgccctggctgttgccttgaaacagtccatgacacctgggttcaaggcatatgctaaacaagtgaaggccaatgcagttgcccttggaaagtacctgatgggcaagggataccagcttgttactggtggaactgagaaccaccttgttctttgggatctccgacctcttggattgactggcaacaaggttgagaagctttgtgacctctgcaacatcactgttaacaagaatgctgtttttggtgacagcagtgccttggctccgggaggtgtacgaattggtacacctgccatgacttcaaggggtttggttgagaaggactttgaacagataggcgagttcctccaccgagccgtgacaatcactttgaacatccaaaagcaatatggtaagcttttgaaggacttcaac

SEQ ID NO: 15130 - DNA, 591 bp, Gossypium hirsutum
  unsure (1)..(591): unsure at all n locations; Clone ID: LIB3829-020-Q6-K6-F4
caatttgtggacatgactcgcataagaattgaaggtcttcttgcagcttttcccaagttggtgggcacgggngaagcaacacacatatgttgagactgagaatgttcgatatgtttatcaaccaatagaagctctttatttgctacttgtaaccaacaaacagagcaatattcttgaagatttggagactctgagactgctttccaagctggtacctgaatattgttactctttagatgaggagggaatttgcaagactgcttttgaattgatctttgcttttgatgaagtcatttgtcttgggcacaaggaaaacgttacagttgcacaagttaagcaatactgtgagatggagagtcatgaagagaaattgcacaagctggtattgcagagcaagattaatgaaactaaggatgtcatgaagcgtaaagctagtgagattgataagagcaagattgataagaataaaggtgataaaggagggttcatgtcaatgggctctggaagaattgaaagtagctctagtgatatgagcatttctagcagtggaagtggcttttgaagtagttctgggttgggataacaactgat

SEQ ID NO: 15131 - DNA, 534 bp, Gossypium hirsutum
  Clone ID: LIB3829-020-Q6-K6-F5
gtttttttggggtagaggattttcttgatgatgataatagcaagccatacacttatcagaaaggaaaaaagtcgaagaatccgaacaagcatgtctcatttaaacaacggaccgaagcctacatggaaccatttacacttgatgtcttcatctcgaagcggtttgtttccgcttctgtcacacatagggtgacatgtaagcaagttgcagtcgcaggcacaaactcgaaagacattaaagcagtactgagatccagatcggacattccggcttgcttggcaatcgggcggatattagctgagagagcgagagaagccgatgtgtatacagcttcttatactcccagggagagggacaaattcgaaggcaaaatcagagctgtggttcaatccctcattgataatggaattgatattaaagtttatcttgattgaatgatttgaattcagttattgatctttacactctttacccaaaccttttgaaagatattttgtgttatttaattaagcttgtgaatatgcttgactgatg

SEQ ID NO: 15132 - DNA, 237 bp, Gossypium hirsutum
  Clone ID: LIB3829-020-Q6-K6-F6
attaaatagatgctgctgggttgtcgggagcttactgaatggcctgaatttacaaaggggccctgaatctgtagattcatgtggtgtaagattaggttctaaaattttccaacctctgctatcataacctcgctgtattttatattcatttcaaatttcattatgtatattcctccattgacaagaattctttgtcgctcgttcttatcatctatgagaattgaactgcaatgcaat

SEQ ID NO: 15133 - DNA, 595 bp, Gossypium hirsutum
  unsure (1)..(595): unsure at all n locations; Clone ID: LIB3829-020-Q6-K6-F7
cggacgcgtggngaaaatttcgatcatttcaccgtttaaatacagaaaattcttaaaaaaattcagttttctttctccctttccattgtttaattttcccggaaatcaaaatgagaaacgacgaaggtggaaccatggttatggagcagcaaaccggtctccatagccgaccaaatatggggactctgttccaacaatcagaacctccgtcgttttctgacgacgatgacttccataatcggaaaagcaatgcttcattgtctagtccgaggtattccaccacaacaagcggcgacggtgaagtctctccttatatgatgtcaccatggaacagccaaccttcttcatggcatcttcaacatcatcagccatgtccatcggagaacgattttggtcaagacggactcattgggtctatcgtaaaagaagaaggtcatatttattcattggctgcttccggtgatatgttatataccggaactgatagtaaaaacatccgtgtatggaagaatttgaaggaattttcgggttttaaagctaaaagtggattggttaaagctattattatactgggtgatcgagtattcaccggtca

SEQ ID NO: 15134 - DNA, 608 bp, Gossypium hirsutum
  Clone ID: LIB3829-020-Q6-K6-F8
gaactcgcgattattgtaccaacgtcaaagcacattattcagatgtgtttgagtgcaattcttgtgagcattgagatgggtcaatttgctcatgtgacaagttacgttagtaaggctgagcaaacacccgaggcacttgaccctccaactattgctaagctacgttgtgctgctggattggctcatctggaggctaagaagtacaagcttgctgctcgtaagtttttggaagtgggtcctgaacttgggaattcctacagtgaagtgattgcccctcaagatgttgctacttatggtgggctttgtgcacttgcaagctttgatcgaactgaactgaagaacaaagttatagacaatatcaacttccggaatttcttagagttggtacctgaagtaagggagcttattaatgatttttactcgagccattatgcttcctgcttggaatatcttggaaacctcaaatcgaatctgatgcttgatatccatatacatgaccatgttgagaccctgtatgatcaaatccggagcaaagcccttatccagtacacccacccatttgtgtctgttgatatgcgaatgatggctgatgcctttaaaacaagtgt

SEQ ID NO: 15135 - DNA, 596 bp, Gossypium hirsutum
  Clone ID: LIB3829-020-Q6-K6-G1
tttccatttgttttgttttttataacttagaaaagatttagtagtgatgttgagtctaccattgctgttattcgagcactctcggctaccataatctctactgtgcaagcatacctcaccaatttattctgcttagcttctcaattttaaaagtgagaataacttttttgttattcataaaagtgggaataactttttgttcaattttaaagttattgatttcatgttgtttaaaaggaatttgttgtttcagttagaagcaattggttgtttaataaaatttgattaaaaaagagatcaataaggtggcgccgcagttaactactgtctttactaagttgcagacactatctacttcaaaccatgcgtctgtggtctctataaacatgtttgtagcgcttctttgtgcttgcattgtgattggtcatcttttggaggagaatagatggatgaacgaatcaattactgcccttatcattggtgtttttactggggtcattattttgttgacaaagctctcatcttttagtcttcggtgaagatctgttctttatctatcttctgccccctattatattcaatgctaggtttcagga

SEQ ID NO: 15136 - DNA, 599 bp, Gossypium hirsutum
  unsure (1)..(599): unsure at all n locations; Clone ID: LIB3829-020-Q6-K6-G10
aaaaagcaaggnagagggtaaccaaacctcccccaacatgttggtctcaacctcgggcctgctcctcccggtgtgcttgtttcttctaatatttggcactgtcaccgctactgaccacattgtgggtgctaacaaaggctggaaccctggcatcaactacaccctttgggccaacaatcagaccttctacgtcggagacttcatctcgtttaggtaccaaaagacacaatacaatgtgtttgaagtgaaccaaactgggtatgacaactgcacaacggaaggagcagtagggaactggagcagcggcaaggattttatacctctcaacgagtccaagagatactacttcatttgtggcaatgggcagtgcttcaacggcatgaaggtttcagtcgttgttcatcccctgccttcgcccactgcctcaccggctgcctcccattcatcaaacagctccaacgccgctggactggtaattttgccaaggggtataactggtttcagaactttggttgttgccttagcttctatttggtttggatctgggtgggtttagcaggactttcagttggctgtttaagcttagggaaccgtatttt

SEQ ID NO: 15137 - DNA, 606 bp, Gossypium hirsutum
  unsure (1)..(606): unsure at all n locations; Clone ID: LIB3829-020-Q6-K6-G11
gnaatttcctttcctttttcgattttttcctccgatttgtatttgaagtgatggatgcaggatcaaaggtgaagaaaggagccggaggaaggaaaggcggcggtccaaagaagaagccggtttctcgttcggtgaaagccggattacagtttcccgttggtcgaattggccgatacttgaagaaaggccgatactctcaacgtgtgggaaccggtgctccggtttaccttgctgctgttcttgaataccttgctgctgaggttcttgagttagctggtaatgctgcaagagacaacaagaagaataggatcattccaaggcatgttctattagcagtgagaaacgatgaagagcttgggaagcttttagctggtgtgactattgctcatggtggtgttttacccaatattaacccagttcttttaccaaagaaaaacgagaaagcggctgcaaaagagcctaagtcgccatctaaggctacaaagtctccaaagaaatcacctaagaaggcttagttgtttgtctattatagggtttgttttgatttatctgttaatgtatgtaggttccttttgtgtactttggttgtaggaaaatgttggtaat

SEQ ID NO: 15138 - DNA, 604 bp, Gossypium hirsutum
  unsure (1)..(604): unsure at all n locations; Clone ID: LIB3829-020-Q6-K6-G12
ctctagactcttcccttgtaactgttaaaatctttgtcactgtgatcattaatggccaccgctgaacctgaagttccagtcactgagcagcagccggcggcagcagaggagccaaagccggcggaaaagcctgtgaaggagaagagacccaaagctccaaaggagaaaaagcctaaacaacccaaatccacagcacgtcctccttattttcagatgatcaaggaggcgcttttggctttgaaagagaagagtggttcaagtccgtacgctatagccaaatacatggaagagaagcacaaggcggtgcttccagcgaatttcaggaaaatcttaggtcttcagcttaaaaactcagctgccagaggcaagctgataaagatcaaggcctcttacaagctctccgaagccggcaaaaaagagaaagcccctgttacaaaagctaagacagagaagaaagctaagccagcttcgaagccgaagaaagctgaggctacaaagaagccaacaaagagagtcggggccaagaagaaatcaactccagcaaaggcgaagcagcctaaatctatcaagtcacctgcggctaanaaggccaagaaggccgctg

SEQ ID NO: 15139 - DNA, 587 bp, Gossypium hirsutum
  Clone ID: LIB3829-020-Q6-K6-G2
ctcaagccggccacctttaaaacgctccaaaatctccactaaaaaagaaaaggcggcgcttctctcgcgattccctccccaaggcggccgaatccccgatgagaagcaaaaactctacgaccaatgcctcaatgcacccacgccggtccgtcacctctcaccgaaagagcgagcccgcgaagccgaacgggaaaaattgggattaataagcaaggagcggcaacgggaaatggagattttgaagaagggaggaagaaaagcaatgggagtccctgacgaacctatgattatgggaactccggggctggatttgattacattgggccttgtcgatgctgataagatacccaaatatgagctgacggtggaggatggccggagattggccaaggagtatagtcgggttttgatgaggaagcatagggcaaggcaggctgctgagactaatttgttgagaatgaaaaaggaggcaattgaagcgttgccggagaaacttaaggaggcggctatgataccagatttgaccccatttccggcaaatcgattgatggcgtctttgactccacctattgaagggtatattgaga

SEQ ID NO: 15140 - DNA, 603 bp, Gossypium hirsutum
  Clone ID: LIB3829-020-Q6-K6-G3
gtgtccgcaaaattcgatcacatttcccctaaattccgtcttttttcttcaaattccccacaaatggccatcactttctcagatctccacacggaatctggccttaaatcccttaatgacttcctcaccggcaaatcttacatctctggggataagctgactaaggatgacataaaagtttatgctgctgttttgaaaaatcctggtggttcatttcccaatgtgagccaatggtataattgtgtgtcttcccatctcgcttctagcttccctgggaaagctgttggcgtttcacttggtggcaaagctgatccagctcaatctgctgaagctaagtctcctgctgcggacgatgacgatgatgacttggatctgtttggcgatgaaacggaggaggataagaaggcagcagaggaaagagaagcagctaaaaagtctgctaagaagaaagagagtggaaaatcttcagtactgatggatgttaaaccatgggatgacgagaccgacatgaagaagttggaagaagccgttcgatctgttgaaatgcctggacttttatggggagcatcaaaattggttgcggtcggatatgggattaagaag

SEQ ID NO: 15141 - DNA, 465 bp, Gossypium hirsutum
  Clone ID: LIB3829-020-Q6-K6-G4
gatgatgtttctgtcattacggacgaccatggtattatgcttcatgttccatgatggggtgggtatgagttcacgtatctcttccacgtgattgtaaaacatcatctcacattgcgccgcaaaaggaactatctgttatctctattccaaattttggtggaattttgaaccaagattgggaccagtatcgatggtgagttattgactagtatggtgatgaactgccatcggattcacagttgatttttggttactaggtgattggttaaagctttaacccaaattgatatgtttgaactttgattagcagcatgccaatctactggtagatgattgttaagcatatcctagttctttaacgctgtccagctatgtcattggcagctatttgtatccttctagttctagttagaaaagcatgtattgcggtagcatatttgtttttaaattagtcgttatcgttac

SEQ ID NO: 15142 - DNA, 574 bp, Gossypium hirsutum
  unsure (1)..(574): unsure at all n locations; Clone ID: LIB3829-020-Q6-K6-G5
cggccgcgtgggtctttttcaggctccctggagactcggatttgacccactagnngtcttggaaaagacccagcattcctcaaatggtaccgagaagctgagctgatccatggacgttgggccatggctgctgtcgtcggcatcttcgtcggccaagcttggagtggcattccatggttcgaggcaggagctgacccaggtgcgatagctccattctctttcggctcactccttggtactcagctcatccttatgggttgggttgaaagcaagcggtgggttgatttcttcaacccccaatcacaatcagtggaatgggcaactccatggtctaagaccgctgagaacttcgccaacgctacaggtgagcaagggtacccaggaggcaagttctttgacccattggggctagcaggaaccatccagaatggggtctacgtccctgatattgacaagcttgagagacttaagcttgctgagattaagcatgctagaattgcgatgttagccatgttgattttctactttgaggctggccaaggaaagacaccccttggtgctcttggattgtaaa

SEQ ID NO: 15143 - DNA, 598 bp, Gossypium hirsutum
  Clone ID: LIB3829-020-Q6-K6-G6
caaggtcgtccccttgcagatcatccagctgtgaagaatgggcgcccacctggtgctctcaccattccccgtgaacttcttgatgcctcgacagttgcagaggcaatcagtgtcatttcatgctggtatgaggataagactgagtggggacaccgtgttgggtggatttatgggtctgttactgaagatgtggtcacaggatatagaatgcacaacagaggatggagatcagtttattgtgtgactaagcgtgatgcattccgtggaactgctccaatcaatctcactgataggcttcaccaagtcttgcgttgggctactggttcagttgagattttcttttcccgtaacaatgctctcctagccagtcctagaatgaagattctacagagaattgcctatctaaatgttggaatctaccccttcacctccattttcttgattgtctactgttttctcccggcactttcgttgttctctggccagttcattgtccagactctcaacgtaacattccttacttacctcctcatcataacagttactctttgtttactagctgtgcttgaaattaagtggtctggcattgagttagaag

SEQ ID NO: 15144 - DNA, 600 bp, Gossypium hirsutum
  Clone ID: LIB3829-020-Q6-K6-G7
gctaatacatgcgtatttatattgatttctgtatagacctttgaaaatactatttctgcaatatcctcacattgacttaaaaacatactctagaatgcaaaatatgtatctctcttgttgctcttggtacattcctgtagatccacaataaagaagcaggtatcgttaacaaccatgaatttatctatgcatcaattatatgagaataaaataaaataaaataaaaagagagtaatgcccttgtaatgttctcaaagcttcattctggtgtaaaatgccagtgaataggcataccttcattgctagcagaggattatgatataagcggttcattcataagtgcatggcatctaatcaaaactaggagaatacacttttcaaaatttgatgctgactaatttaagagccatataatatgaacgactagcttgtatctagcaacaagaggtgagttcaggtttttagaagacactactaagtttcatatatacgggactgaagattgggtgaactatcaaggagcccaagacactactaaggtttgttcacttctgccatacataagaagtcaacagacgttgtgcatttttccatgtaaag

SEQ ID NO: 15145 - DNA, 600 bp, Gossypium hirsutum
  Clone ID: LIB3829-020-Q6-K6-G8
cgacaagtcacttgaagacctccggccccatcccaatctcaaggagctctttattggaggttggaggggtgatgccaagtttccaagttggctttctttgctcacaaatcttaccgtgattagaatatggggtcctagtaatttcaaacaaatcccgtcctttgcgcaattgctttgtcttcaaaagctgtcaattgttgatttaactgagctggagtacatggacgataatagcccaaaaggaagtcagggagaaccggagtcattcttcccatcgcttaagtctctttgcctcgagaattgcccaaatatgaagagttggtggaggaaaaggtccattgatgatgataacgaggatgacacaacagttataggaacatcaatgatggtatttccttgtctttcctctttagaaattgtaaattgccctttgacttcaatgccattgtatccttcactcgatgatgatctaaggttggtgaagagcagttcaaggccgttaaagcagaccatgaagatgaacatcactagtacgaccccatcaacttcaacatcttctcttcctctctccaaattgaaatctttccatgtgcacaaaat

SEQ ID NO: 15146 - DNA, 606 bp, Gossypium hirsutum
  Clone ID: LIB3829-020-Q6-K6-H1
gcaccctgctgtgtacaaggttgggttgcagtatttgtctggggatatacgtggtggcaatgcacgttgtattgcgatgtttcaagcgttcaaagaggctatcaaagattactcaactccacctgagaaaactctaattagagacttaactgcaaggattagtagttacgtttctttcttgattgaatgcaggccactctcaattagtatgggcaatgcaattaagtttctaaagaatcgaattgcaaaattaccattggctctgtctgaatcagaagcaaaatctacgcttatgttggatattgatcttttcataaatgaaaagatcatcctttcagagaaggtgatagtcaaacatgctgttacaaagattcaagatggtgacgttcttctcacatatggtgcatcctctgtggttgagatgattttattgcatgcccatgagcttggcaaacacttccatgttgtagtggtcgactctcgcccaaagcttgaagggcagctcttactacgtaggttggtgaggaagggccttagctgtacgtacacacatgtaaatgctgtttcttgtataatgcaagacgttactcgagtttttctgggtgc

SEQ ID NO: 15147 - DNA, 623 bp, Gossypium hirsutum
  Clone ID: LIB3829-020-Q6-K6-H10
cacggtttgtgaatataagagacgctaggggagccactcctttgcacttagcagctcgtcaaagacggcccgaatgcgttcatatcctgttagacaacggtgctctcgtttgtgcttcaaccggtggatacggttgtccaggaagcacccctcttcatttggctgctagaggtggatctctcgattgtatacgtaagttgttggcatggggtgcggatcgtcttcaaagagatgcaacagggagaataccgtatatagttgctctcaagtacaaacatggagcatgtgccgctctgttaaatccatcatctgccgaacctcttgtctggccagcacctttaaagttcattagtgagctcaatgacgaggcaaagtcactattagaacaggccttaatggatgcaaacagggaaagggaaaagaacatcttgaaaggaacagcttactcacttctatcaccgtcaccttcccgctctgattctgggttagacgacagtatttctgaggttagtgatgctgaactatgctgcatatgcttcgagcagatctgcacgatcgaagtccaagactgtggtcaccagatgtgcgcacaatgcacattggccctttgctgccataacaag

SEQ ID NO: 15148 - DNA, 597 bp, Gossypium hirsutum
  Clone ID: LIB3829-020-Q6-K6-H11
cggccgcgtgggcggacgcgtgggcgagttacaagttctttaaagcttcttcttggtgtggcaacaatggtctgatgccaagatgtgaatttagcacaaagcctctaacaaggtcttttgatttccatccttatggttctcgatgtttagtgagattatcttcctttagcagtcagcgccactatgcttctcatgcgtcccatgcttccactgagcggaaatccaaaaagactcttttgtatcttactgcattagtgtttgcaatggtgggaagtagttacgctgccgtcccattataccgaagattctgccagggtactgggtatggtggtactgtccaacgccgtgagagtgttgaagaaaagattgctcggcatgaaaaagatgggacagtagcaacaaggtgcgctttctaggctttggatggagatagtagtgcaattcaatgctgatgtggcggatggaatgccctggaaatttgttccaactcaaagagaggtgagagtcaagcctggagaaagtgctcttgctttttatactgctgaaaaccgaagttcaaaacccataactggtgtctctacgtataacgtcactcct

SEQ ID NO: 15149 - DNA, 618 bp, Gossypium hirsutum
  Clone ID: LIB3829-020-Q6-K6-H12
gggaaccgaggattggaacgaggaatgaccaacaaccacgaaggtgacaaagtgggggatggcaagcccaaaactatgcctcctgcaagtgtcatcacaaggctgatactgatcatggtttggagaaagcttatcagaaatcccaacacttattcaagcttaataggactcacttggtctctaatctcattcaggtggaatgtacaaatgcctgccataatagccaagtccatttccatactgtcagatgcagggcttggcatggccatgttcagtcttggtctgttcatggcattgcaaccgaggatcatagcatgtggaaattccgttgcagcttttgccatgggtgtgagattccttgcaggtccagctgtgatggcagccgcttccatagctgtcggactccgtggcgttctcttacacgttgccattgtgcaggcagctctcccacaaggcattgtcccctttgtctttgccaaggaatacaacctacaccctgatattctcagcactgctgttatttttggaatgctaatagccttgcccataacgcttgtctactacatagtattgggattatgaaggggccatctctaacctaaatatcaacattttaat

SEQ ID NO: 15150 - DNA, 603 bp, Gossypium hirsutum
  Clone ID: LIB3829-020-Q6-K6-H4
gtgctattgggatgattggtgggaagggttgttcctcgtggatgcaagttaaggaaaagggaaagaagaagatggccaacagagttagagtttattgttcttctgctccgtcggtgatggatccttataaaactctcaggatccaacccggcgcctctgaatctgaagtcaaaaaggccttcaggcaacttgcccttcagtatcatccggacgtttgcagaggaagcaattgtggggttcagtttcaaacgatcaatgaagcttatgatatattgatgagtagattgagaggagaaacaaaggcagcagaagtgtatgaggaagagatagatgagccaatgagaggaatggatgattcagattgggatttgtgggaagaatggatgggatgggaaggagctggtattcgtgactattcttcccatatcaatccctacatttgatccttcaactgtacattacctctcttttttctttgtggaaatccaaatactactggtggctgtgcccccccccttctgtgtatataaaaacaaactctaattgtatcaatttctcatgaaaaaaagcatcacaagttaaataaataaaatcgattttatc

SEQ ID NO: 15151 - DNA, 366 bp, Gossypium hirsutum
  Clone ID: LIB3829-020-Q6-K6-H5
agaaagaaataaacataaactcaattaacacattgaggggaataaacaatgaccagttcacaacataataaaccacagaacagcagagagcacgtacgggatgtagctcactgtcttttattctaggaaacacgacacggtaaaggcgggggcggcgtataatagaagacgatgatattttggaagaagagtttatcttggagtggtaccagaagggtatagctggtagcaataagggttctcagatatggaagaacctcaagcccttcattgagtggctccagactgccgagtctgaatcggaagatgagtgaatcccgaagctcttcgtgtggtatcttcactatgttaaaccttctcttctcg

SEQ ID NO: 15152 - DNA, 612 bp, Gossypium hirsutum
  Clone ID: LIB3829-020-Q6-K6-H6
gcgttcgtcactcttctcttttcgccaggcttcatgttttgttgacctctcaacttgcttagtttcctttggttgtcgtcgttgtttttcgtgaaaatggcggtggatctgatgagttttcctaagatggatgatcagatggccattcaggaggctgcaacgcaaggtatgaagagcatggagcacctgattagcctcctttctcaccagtctaaccgactcgactgcgctgaggttgccgatctcaccgtctctaagttcaaaaaggtcatctcactaattaacagaaccggtcacgctcggttcagacgtgcaccgattcagtcctcttccttttcctcatcgtcatcatccgctgcttctctaactgttactgattcccacaaggctctaactcgaactcctgccccggttgaaacaccgccgctgaccgtaaatccggcgccggttgaagctccaagtacggatcctgctagtttcgttcctttgcaaccccagagtttaacactcgattttacgaaaccttatttgtttagttcgaacactaaaagcactgagttggagttcacaaaagaaagcttcagcgtgtcgtcgaactcttcgtttatgtct

SEQ ID NO: 15153 - DNA, 605 bp, Gossypium hirsutum
  Clone ID: LIB3829-020-Q6-K6-H7
gctttttgcagtgtttatatttattgattctcttagttctcgttttcatcggagaaaaaaaaagagaaagtcaaaaacaaaaatttcatggctcggaaattcttcgtcggtggcaactggaaatgcaatgggacaactgaggaggttaaaaagatcgttacaacattgaatgaagctgaagttccttctgaggatgttgtggaggttgttgtgagccctccatttgtttttcttacctttgtgaaaagtctgttgcggtctgatttccatgttgctgctcagaactgttgggttcgcaaaggtggtgcttttaccggagaaattagtgctgagatgcttgttaatctgagcattccatgggttatcatcggtcactctgaaagaagggctctcttgaatgagtccaatgagtttgttggagacaaagtagcgtatgcactttctcaaggcttgaaggttattgcctgcattggggagactcttgaagagcgagaatctggctctaccatggctgttgttgctgcgcaaaccaaagcaattgctggaaaagtaacaaattgggacaatgttgttttggcttatgaacctgtttgggccattggaac

SEQ ID NO: 15154 - DNA, 590 bp, Gossypium hirsutum
  Clone ID: LIB3829-020-Q6-K6-H8
gtgttgacaatgatggtcgcgtttctccctttgcttcttctggagttgctgcaaagtacaatgggaacgtttcagttcttcctccacagacttctcagtctcaagagggtggaaactcattggtactgaccacaacaagctcatctcctgtagtgactcaagctgctgggatgatgcaaagttctttggctgtgactcagcaaccagtccctgtctaccgctcagcagctggggtgcatttaccacattatcctccaaactacattcaatatgcccccttttactctcctttttatgttccttctcctgcgatccaccaatttataaacaatggggtgtttcctcaacaacctcaagctggtactgtttatccttctgtaccagcggctcctactacaggagttaaattttcacttcctcaatttaaatctggaagtaatacaccaagttctattcatattggaatgccaagtggttatggaccatatggctcctccccagctggttataatccaagttctgctgtggcaactgggaactcaaccacgaatgaggatctcggtggtgctcagttcaaggaaagcaatgtc

SEQ ID NO: 15155 - DNA, 588 bp, Gossypium hirsutum
  unsure (1)..(588): unsure at all n locations; Clone ID: LIB3829-021-Q6-K6-A10
cgttctttttttntgctttcttatcgacgccatgggcaccgtagcgggngtcgttatccgacaaggagttcaatcgtgagtttcggtnngagatgctcatcgactntcgtccccacccgtctccggncgtttcttttagctgaagctccnaggcttcctcaaagcccccggtgngagccccagccaacgtggcgattgccgtctcaagactaggcagtaaagcatccttcatcggaaaactcggcgacgatgagttcggtcacatgcttgccgatattctcaagcaaaacggagtctctggtgacgggatcttatttgaccaaggtgctaggaccgctcttgccttcgtaactctacgcgccgacggagagcgtgagttcatgttttataggaatcccagtgctgacatgctgttgacgccggaggaattgaatcttgatcttataagatccgccaaagtattccactacggatcaataagtttgatcgtagagccatgcagatcggctcacttaaaggcaatggaagtggccaaagaatcaggtgctttgttgtcatatgatccaaaccttcggctgccactttggc

SEQ ID NO: 15156 - DNA, 543 bp, Gossypium hirsutum
  unsure (1)..(543): unsure at all n locations; Clone ID: LIB3829-021-Q6-K6-A11
cagtgcactttaaaaaccccgggggggggggggggggggaancataagataaagttgacatcttcntaatgggaatagggagtggtggtactgtttctggtgttggacagtacctcaaatcccaaaatcctaatgttctttttttttttttggagcctgctgaaacttttggggggggggggggcaaaccanntcctcatcatattactnntaacccanttaaattcaaaccanacatattgnacatggatgtaatgganaaagttctcgaggttagcagtgaagatgcagtaaacatggcaagggaattggcattgaaagaggggcttatggttggaatatcatcgggggccaacactgtttcagcactcagacttgcaagaatgcctgagaacaaaggcaaattaattgtgactgttcatccaagttttggagagcgttacttgtcatcggtcctgttccaagaactaacgaatgaagctgaaaacatgcaccccgttgcagcccattaaatgccttttcaggggacatgttaggaagctt

SEQ ID NO: 15157 - DNA, 376 bp, Gossypium hirsutum
  Clone ID: LIB3829-021-Q6-K6-A12
gtttcaacacccatcatcgccatcgtcgtcgtggctctttgaggccaccgtggttcccaccgtatacggtagtcgagggccacgtaaacttgggttatttaaccccttttgttcaaaacgagcccgacggtgagggtcttctagaccgaggaagatccgaaagaaggaactccctccccgcgacctcttcaagccgaattcgacgacggaggagcagtctccgacgacgaggctacttgggttcggtaaaccccttcttttctttgatatatgcccccttttcatcaaaaagtttgtaaaaagaaaagaaaaaaagaaaacaaacaaaaaaaaaacgaaaagaaaagtagagaaataaattgaagtccaccttttc

SEQ ID NO: 15158 - DNA, 564 bp, Gossypium hirsutum
  unsure (1)..(564): unsure at all n locations; Clone ID: LIB3829-021-Q6-K6-A7
cccagcgtccgcagnaatagcactgggcgaggtggtgctcctggttcaggtgataatgaaagcaggaatgtgctggatgcttttttcttagggaaggctgtagccgaagcattgaatgaaagaatagagtccacaattggggagtttttgagtgttgttggaaggttgcaggctgagcaacaaaagcaagtgcaggatttccaggaagagatattggaaagagcaaaaaaagccaaagagcaagcagcacgcgaggcattggaggcacaggggctgattccgaaatctacttccctaagtacatcgatgggcagtggtggcactgcaaacaatggggctgcagctaaagcttcgccctcaactgccaataacggagtttctacaaccccatcctcctataatcccgccaaccctgctgctgctaatacagaccctgggctggatactaaaaaggaatagtgccaaagtatctctatttgtatttcacacttttcatctgatacagtaccaaatatatataatatccagggtgtttaatcccccaaaanaaaaaaaaanaaanaa

SEQ ID NO: 15159 - DNA, 564 bp, Gossypium hirsutum
  Clone ID: LIB3829-021-Q6-K6-A8
ccgaaactgtgattggcttgaagggtttcaggtttgtcattctttgggaggaggaactggatctggaatgggaacacttttgatatcgaagataagggaagaatacccagataggatgatgttgaccttctctgttttcccatctcctaaggtctctgataccggggggggggcttacaatgctactttgtcagttcatcagttggttgaaaacgctgatgagtgcatggttctcgataatgaggccttgtatgatatttgtttcaggacacttaagctcaccactcccagctttggtgatctgaatcacctgatatctgcaacaatgtctggggttacatgctgcttacgattccctggtcagctcaactctgatctaaggaaacttgctgtgaatctcatcccatttcctcggcttcatttcttcatggtgggttttgctccactcacttcaagaggctcccaacagtacagagccctgacagttcctgagctaacccagcaaatgtgggatgcaaagaacatgatgtgtgcagctgatccacgacatggcagatacttgac

SEQ ID NO: 15160 - DNA, 336 bp, Gossypium hirsutum
  unsure (1)..(336): unsure at all n locations; Clone ID: LIB3829-021-Q6-K6-A9
aatcacagnntaatttagnaattttattatagnnaaaatgttaggnaggggcaacaacagttattattctgtnngcttccnncattttccttgggatggangaaggatgctnntcaatatcagnnaatcagnacnntaatggatnncaaaccaactnngcaattatttttggaaagcttnngccagctgnnggtgcaatgntnntgatccctgtnngaattannttttggnnnaaatgaaannnatcttgnnctcccatgnnnattcgacncnncaataanaagnaaggcagnagnnaaacagnaagaacattnnncaaaggcagcnnnaaaagct

SEQ ID NO: 15161 - DNA, 588 bp, Gossypium hirsutum
  unsure (1)..(588): unsure at all n locations; Clone ID: LIB3829-021-Q6-K6-B10
tcgctctctgcaaccagcggcacccaaggagcaaatcttcgtcaaaaccctaacggggnaagaccataaccctagaggttgagtcttccgacaccatcgacaatgtcaaagccaagatccaagacaaggaaggcatcccacccgaccaacagcgcctcatctttgccggcaagcagctcgaggacggccgcaccttagccgactacaacatccagaaggaatccaccctccatctcgtgctccgtcttaggggaggtgctaagaagagaaagaagaagacctacaccaagcccaagaagatcaagcacaagaagaagaaggtcaagctcgctgtgctacagttctacaaggtggatgaatcgggtaaggttcagaggctgaggaaagagtgccctaatgctgagtgtggtgctggaactttcatggctaaccatttcgataggcactattgcggtaagtgtggactcacttatgtttaccagaaggctggtggagattaagtagggctcgtgcaaaagatggatcttttagggtttttccaatatgggttttaggttttaaattttcagtaatcgtcggattttgttt

SEQ ID NO: 15162 - DNA, 570 bp, Gossypium hirsutum
  unsure (1)..(570): unsure at all n locations; Clone ID: LIB3829-021-Q6-K6-B11
gcttcaccatcagnagataatatgggatatgggagggggatgatccttggtcccacacagtctccatatgaaggaggggttttcaagttggaactatttttgcctgaagaatatcccatggctgctcccaagttcgatttcttacatagatatatcatcctaacattgataaggtggggagaatatgcctcgatattctcaaggacaaatggagtccagctctgcagatccgaactgtacttttaagcatccaggcactcttgagtgctccaaatccagatgatccactctcggagaatattgctaagcactggaaatcaaacaaggctgaagctgttgagacagcaaaggaatggacgcgtttatatgcaagcggtgcatgaagaccggtggaaccgtttgctctcataaaataacatttttatgcaatgtaagctattcaatgtcaattccatattgaaatctggacgaatgacagtttgaaagagtttgatatttgcaaccaaaaaaaaagcttccaggtgctacccttttagtagtaattcggtcggaagcaatctctaagcttgt

SEQ ID NO: 15163 - DNA, 529 bp, Gossypium hirsutum
  Clone ID: LIB3829-021-Q6-K6-B12
tcaaggaggcctttagcctctttgacaaggatggcgatggttgcattactaccaaggaactgggaactgtgatgcggtcactcggacagaaccctactgaggcagaactccaagatatgattaatgaagggggggccgatggaaatgggaccatcgatttccctgaatttctcaacctgatggcaaggaaaatgaaagatactgattctgaggaggaacttaaagaagctttcagggtgttcgataaggatcagaacggtttcatatctgctgccgagcttcgtcacgttatgacaaatcttggcgagaagcttaccgacgaggaagtcgatgagatgatccgtgaagccgatgttgatggtgacggccagatcaactacgatgaattcgtcaaagtcatgatggccaagtaaggatctctccaaccaaaaaaaaaaaaaaacagagtagataagtttgcagagatttcaatctcgtaattggttcgtgggtcgttcgtttatcgtttgcattaattcgtcgaccggct

SEQ ID NO: 15164 - DNA, 579 bp, Gossypium hirsutum
  unsure (1)..(579): unsure at all n locations; Clone ID: LIB3829-021-Q6-K6-B7
cggncgcgtgggtcgcccacgcgtccgggaagctgtgggccttggtggttggcattggctggttttgaagaatggcgttgaagtcaagttgcaaagaacgcattgagcgtgttggaacatcctaccggcaacgaagtagacgatgatcatgatttggataactcgagcagtggctccgacattgctagtagcatcgagttccagaggccagcgaaacccagagttcgacatacgaaaccttgggttccatctgcatccatgaaatcaacgaatcgtaacggttacagagacgtccgatccattattcatgcgccacaatcgggtggcatcaatgcttattcaccaagggaacaaatgcttaatactgtgcagcagcattttatgtcgcagctgccgttgaacgaggtacacgtgatatcggaattcatcacagcggctaagagactgaaaacggtagacggtgacaccaagggtgagcaactttgagtgttgtcaaacattgtataatttacatacatatctttaactctaaccttagattagaatctaatttgaaaaaaaaaaagactaattgggaag

SEQ ID NO: 15165 - DNA, 568 bp, Gossypium hirsutum
  unsure (1)..(568): unsure at all n locations; Clone ID: LIB3829-021-Q6-K6-B8
gttcttgtgttttgaagaattggcctgaaaggatattcaagttattgttgtaactgatggtgagcgtattttgggacttggggatcttggctgtcaggggatgggaattcctgttgggaaattgtctttgtacacagcactcggaggggttcgtccttcagcgtgtttaccggtgaccatcgatgtgggcacaaataatgagcagttgttgaaagatgagttctacattggacttagacaaaggagggcaaccggacaggaatatgctgacttgctacacgagttcatgagtgctgtcaagcagaactatgggngaaaaagttcttatacagtttgaagattttgcaaatcataatgcttttacattgcttgcgaaatacggcacaacccaccttgtcttcaatgatgatatacaggggacggcatccgttgttcttgctggggttgtcgctgcattgaagttgattggtggtaccctagctgaccacaaattcttgttccttggtgccggggaagctgggactggtatagcagagcttatagctctcgagatgtcaaagcagacaaa

SEQ ID NO: 15166 - DNA, 525 bp, Gossypium hirsutum
  unsure (1)..(525): unsure at all n locations; Clone ID: LIB3829-021-Q6-K6-B9
gttttattaaattattaaactttataaacngaaattaaagtatactcaatttttacgaacgatatgttatttttgatatttcactaatcaataatattaagaaaatatcatttcatctcttttggctcatcttcaactgctatcaccggatagctctttgacaggcccatcgaattagcaaaacagattttgctaggaactttagtatcatccacagaaatatcagagacagtaatccaaatcatcatctctttgcttttaacaccagtcaacttcttcaactgacgatctccgataaacgctgtaatttcagcaccataagacgagagcccaagctccttgaacaaatacttgacggtcttctcctgattcaaccaaatgaaccctgtgatcttattgtagccgaactcattgatgtggctcaaaggcatcaaccctttagggagatggaagtggtcgaggaggtcttgcgttttttgcttgcaaagagtagttccatggtagatctcaggttctagatcgcga

SEQ ID NO: 15167 - DNA, 563 bp, Gossypium hirsutum
  unsure (1)..(563): unsure at all n locations; Clone ID: LIB3829-021-Q6-K6-C10
gcgaaacccnagccactctctgctcactcgccagtgggggcttataagtacgtgtcggagctatggaggaagaagcagtcggatgtgatgaggtttttacagagggtgaggtgctgggaataccgccagcatccgtcaattgttagggtcaaccatcctactcgccctgacaaggcacgccgcttgggttataaggccaaacaaggttatgtggtttaccgtgtccgtgttaggaggggtggtcgcaagaggcctgttcctaagggtatcgtgtatggtaagcccacaaaccagggtgtcacccaattgaagttccagcgcagcaagcggtctgttgctgaggagcgtgctggccgaaagttgggaggtctcagagttgttaactcgtactggatcaatgaggactctacttacaagtactttgaggttatcctggtggatgttgcacacaatgctatccgcaatgacccaagaattaactggatctgcaatccggttcacaagcacagggnaacttcgaggacttacatctgctggtaagaaaaacagggtctccatggaaa

SEQ ID NO: 15168 - DNA, 573 bp, Gossypium hirsutum
  Clone ID: LIB3829-021-Q6-K6-C11
gcgttcgtttggtaccaaattcaactgtggttcaggtgggtggcgagttgccgatccagtcttttggaaatgagatggagcgacagctccaagcggatcagatcaatggttcaatttggacaaatgatcagagtggtgatgtctttactccatcagatcgaatcttgggaatgcctcttcaagttgagggttggtgtacaatggtaataatcaagatgaaggtgacaaaaagggcgagggtgcaagccgattttctactgcactgtggtcatttgtggattcaatacctactactcctgcttctgcatctgagagtcctttggtaaaccgagcctttgagcgaatgtctagcttcagtaggttgagaatgaatgttagaaacaccaatgcgttgacagtcaatggtgtcacaactgctcggaggagaagcaggaataaggggttctttttattttctattttaggtgcattgtgcgctatattatggtttctgatagggatggttagggtcgtaaggagttcgatctcctcatgaagatataatgtaagtgggaagttttgttagttatgtta

SEQ ID NO: 15169 - DNA, 596 bp, Gossypium hirsutum
  unsure (1)..(596): unsure at all n locations; Clone ID: LIB3829-021-Q6-K6-C12
gcgttctcggncgcgtgggcggccgcgtggggggctgtgggggggttncagaaaggactcaaagagatgtaacaaacaagggaaagaggtaatgtatgacttggaagacaaaattaatcaagctgtctttcctggtcttcaaggtggaccacataatcacaccatagctggtttagcagttgcatgggggggggtactctgataaaaatttttttgtgtatatgcaagttaaacacactatgccaagctcaggccatacaaaatcttgatacaagttaaccaggagcctttaggtttcttgagtttgacatatgtgcttataggtcagaacacccgagtacaaggcttaccaagagcaagttcttagtaattgctcgaaattttctcagaggttgctggagaacggctatgaactagtatctggtgggaccgagaaccatttagtcttggtcaatttgcgaaacaagggtattgatggctcaagagttgagaaggtattggaatcagttcatattgcagccaataaaaacactgttccaggggatgtgtctgctatggttcctggtggtatccgcatgggaaccccagctctcaca

SEQ ID NO: 15170 - DNA, 562 bp, Gossypium hirsutum
  Clone ID: LIB3829-021-Q6-K6-C7
cttttgggcattgcttgggcttttggtggcatgattttcattcttgtttactgcaccgccggtatctcaggtggtcacattaacccggcggtgacatttgggttgtttttggctaggaaggtgtcgttaataagggcggtggcttacatggtagctcaatgtttgggtgctatttgtggtgttgggttagttaaggcattcatgaagagtgaatacaactcccttggcggcggtgttaacacggtggcgactggttataacaaagggactgctttgggagctgagattattgggacattcgtgcttgtttacactgttttttcagctactgaccctaaaagaagtgcccgtgattcacatgtacccgtgttggctccacttcctataggatttgcagtgttcatggttcatttggctactattcctatcaccggaactggtattaaccctgctagaagcttcggcgccgccgttatttacaacaacgacaaggcttgggatgaccactggatattctgggttggaccaatggtgggagcacttgcggcggcggcatatcatc

SEQ ID NO: 15171 - DNA, 564 bp, Gossypium hirsutum
  unsure (1)..(564): unsure at all n locations; Clone ID: LIB3829-021-Q6-K6-C8
ggnccttcctttgaacactcagnanaaagttgcagcaaaacaagaatcttgaggttatccgcaagaacttggtaaagaagtgcattgagctcttctttgaaaagcagagaacaaggaagattacaacaagttttatgaggcattctcaaagaacctcaagcttggtatccatgaggactctcagaacaggactaaaattgccgaattgctccgctaccactccaccaagagtggtgatgagctgaccagcttgaaggactatgtgaccagaatgaaggagggtcagaatgatatctactacatcactggtgagagtaaaaaggcagttgagaactctcccttccttgagaagctgaagaagaagggttatgaggtcctttacatggttgatgctattgatgagtatgctgtcggacagctcaaagaatttgagggcaaaaagcttgtgtcagctaccaaggaaggtcttaaacttgatgagagtgaggatgagaagaagaagaaggaagctttgaaggaaaagtttgagggtctttgcaaggtcatcaaggatgtgctgggtga

SEQ ID NO: 15172 - DNA, 592 bp, Gossypium hirsutum
  unsure (1)..(592): unsure at all n locations; Clone ID: LIB3829-021-Q6-K6-C9
gttttagtgaaggaaaaataaactaganatgtttttgttcgattggttctatgggattcttgcttccctcggtctatggcataaagaggccaagatcttgtttttagggcttgataatgctggcaaaaccacgctccttcacatgctcaaagatgagagattagttcagcatcagccaacacagcatcccacatcagaggaattgagcattgggaaaatcaagtttaaagcttttgatttgggaggccatcagattgctcgaagagtttggaaagattactacgccaaggtggatgcagttgtttacctggtagatgcttacgacaaggagaggtttgctgagtcaaaaaaggagttggacgctctcctctctgatgaatctttggctaatgttccattcttgatattgggtaacaagatcgatataccatatgctgcctcggaagatgagttgcgttatcaccttggcctgaccaatttcaccacgggcaagggtaaggtcaatttgggagactccaatgttcgtcccctcgaggtattcatgtgtagcattgtccgaaaaagggttatggagatggtttcaagtgggttt

SEQ ID NO: 15173 - DNA, 557 bp, Gossypium hirsutum
  unsure (1)..(557): unsure at all n locations; Clone ID: LIB3829-021-Q6-K6-D10
ctttcatgnaagcatccatacaactcccttggcggtggtgcaaacacggtggcttctggctacaacaacggaactgctttgggagctgagattattggaactttcgtacttgtctacactgttttctcagccaccgaccccaagagaagtgctcgtgactcccacgtccctgtattggctccccttccaatagggttcgcagtgttcatggttcacttggctaccatccccatcaccggtactggtattaaccctgcaaggagtttcggtgctgctgtaatctacaacaacgacaaagcctgggatgaccactggattttctgggttggtccatttgttggagcacttgcagcagctatatatcatcagtacatccttagagcagcagctatcaaagctttgggatccttccgcagcaaccccaccaactaaaaaaaaatcaacccaaatagctttgtctccacttcactctttttctattttctccatttgttcgtttgtgtgtatgagaagattattattatgaatgatgatgatgaccctctccatgtatcact

SEQ ID NO: 15174 - DNA, 597 bp, Gossypium hirsutum
  unsure (1)..(597): unsure at all n locations; Clone ID: LIB3829-021-Q6-K6-D11
gcgttcggnttgatgtagctcatggtngaaggagatgtggggggggggaatgaatgcctcccccaaccacttcttgttatgataattcaatccagtcaagagatttaatgccgaaacatcattggctcaagagcataagaatggaaaatctagtagaaggaaactgcaagctctttggtattcctgtgagaggtgcttctagcgcatcagagcctgcagtctctcatattagtgctttcgccaagcctgtaggacatatgcaagctgcattgcaccaggttcatgcacttgaatctgataaaaggtctgaaaattcaaacgcctcccagatggcagaggatgtttctgcttttaatgagcaggagaaaatagtgaagctgggtcagccccatgcacgggagtttcaaagcaaactgtctactgcttcaactaggagttgtactaaggttctcatgcaggggactgctcttggaaggtctgtggaccttaccaagttcaacaactatgatgagttgatcgctgaattggatcaattatttgagtttggaggtgaattaatggcccctcaaaagaactggcttgttgtttatactgatg

SEQ ID NO: 15175 - DNA, 578 bp, Gossypium hirsutum
  unsure (1)..(578): unsure at all n locations; Clone ID: LIB3829-021-Q6-K6-D12
tcggnaaaggtgtcattggnaaaaaaacaggggggaggggaggcagaggcaacagtaataggacaaccaatagtgtcaatggaggtagacaggcagcgaaacaggctccgtgctgcagaggcaatggctgaggcaagagccgctgctgagcatggtgatctaactggtgcagtctctctgggggagagttgtcgcagggctttatcagaaacaatttctgcacggtctggtgacaggctatgtgttgcattgtgtgctgagctaaaggagatgcaagaaagaatggcaaaccgtcgtgtgtatgagtcatctggaagggcttatgttttgtcaggtttgagctcacattcctggcaaagagcgactgcacgaggcgattccaccgatagtacaagccttattcaagcttaccagacccctaccatgacagacatggtgactcgttctcagaccatgttctttgggaacccaccgcagcgaaagcttcgacaagctcagtcattcccagcgcgtccacacccacggtaaacgtaagcttctttgacaagctcagctcagtccattcccatcatgtccac

SEQ ID NO: 15176 - DNA, 572 bp, Gossypium hirsutum
  Clone ID: LIB3829-021-Q6-K6-D7
gctgcctttactcaacttcgcacttctcctttatcgttttctcgactcaacgtccttgtcttcgcccctaattgttaagggcgaattgatttcataacttcacgatcagttcataagatttgccaggttcgtactacacatgttagacggaattaatgaaaaaaaaaactgttcctttcagcaaaagattatgagtgattgtattcttgctatgttggtaagggattaattttaaaagtttcttgcttttttaattgcatgtggcttttactggcagaaggttaatgagtcgagagtctttatttttcgattttcattctctgtttttatttgtggtttaagctttggggtgcttttttttttaaaatggttttattcattgacatacttggataagtagatcatatcatcttctaggtaacatgaatagggttagtcaaaactcgtcgttgtttcggagattgttgcatacattatcccgcgatgatggtccttctgaaaccttgaagaaaaaggttcctgaaatcgagaggacgaggaaaaggaggaaccccaagaaggctcagttgttt

SEQ ID NO: 15177 - DNA, 571 bp, Gossypium hirsutum
  unsure (1)..(571): unsure at all n locations; Clone ID: LIB3829-021-Q6-K6-D9
ctccggnanaatctgcggcggttccagccccatctaaatctgctccgtcttctcctccggctgctgcgccggtgagttctccaccggctccagtacctgtgagctctcctccagccagatcgcctcccgttgctgcaccgacgactccaccagagagctcggcctctcctccggctcctgttacggcaccaactactgctgaggttccggccccagctccaagcaagagcaagagcaaaagcaagaaatccaagaaacaccatgctccggctccttcacctgatatgcttggacctcccgctccaccaactggagctcctggaccgagcctcgatgcttcctctcccggtccatctgtcgctgccgacgagagtggagcagaggcaatgaagaacatgaagaagataattggagggttggcgttgggatgggcagccattgctttgagcttctagattggttttgatcacattccacattttgcgttgtaattctttggctggtgtactgagaggcggaaactctagttttttttttttcctctgtaatttccactattcttgttttttcc

SEQ ID NO: 15178 - DNA, 590 bp, Gossypium hirsutum
  unsure (1)..(590): unsure at all n locations; Clone ID: LIB3829-021-Q6-K6-E10
gccaaatggattacatgtcccttgtgcctggtgttgtgcccattaataactacaagggtttcgtgcgaatgactggcttttgcaaaactaagataccggatgaggtcactgctgccttagagcctatcaaggacaatgatgaatctgtcaaatcctatggaatccacctcggaacagaaatgtgccgcaagattttagcccatgggattaagacgttgcacctttatacattaaacatggagaaatctgcattagctatactaatgaaccttggactgattgaagagtccaaaatttctaggtctttaccttggagacgccctgcaaatgtcttccgtgttaaggaagatgttcgcccaatattttgggctaaccgtccaaagagttacttatctaggactattggttgggatcagtacccacaggggcgatggggtgattctcgaaatccatcgtatggtgcactatccgactatcagttcatgaggccccgtgcacgtgacaagaaacttcaggaagaatgggctactcctttgaaaagcattgatgacattcaagagnaatttaaaaaccattgtctgggtaagttg

SEQ ID NO: 15179 - DNA, 519 bp, Gossypium hirsutum
  Clone ID: LIB3829-021-Q6-K6-E11
ttctggcccatcatcccacaaaactggggagggagaggggttcctactctttcactctcaattcccacaacttgcttaacccaaaatacccactttttcacatccttataaataacttcatttccctacccataactcatggattgtttgttattgcctgtttgcttattggggggggggggggggggatcacggctaggctaccggcgtctaacgcgcgagttggagccacaagtgagggtggtggtagggaaagagaaacgagaattttgggtggaccctttggtgttagaggagaatccattccgggttttgatggaaacattgaagaaagggaatggcagccatgcaacaaggcagaagaaaaacaggtgatattcctggacgtggatgctatcttgtttgagcacatgctgtggttgatgaacaatgattcttcttctttgttccaacttgctctccaccatattatcgactcctatgctcaagactaccacaactttcaccttgctcttacta

SEQ ID NO: 15180 - DNA, 584 bp, Gossypium hirsutum
  unsure (1)..(584): unsure at all n locations; Clone ID: LIB3829-021-Q6-K6-E12
tctttgcctactcccttgggggtgggggggggggcttaaaaagatagccgtgagaaacagnattgccgccaaagaagcttactgtgaaatgggcaccagatgtgtatgatcctccgccgacatcagtattgcacacagttatttttttaaacagcagaaatcaaataataagggggggggaagaaaaagggaagaaagggcanaagggcaacaactcaagacgaggctgtggtggtggaaaagacaacaaacaaatacgcaggggtggcgggagttctgataggtgttataaaccaccgccagaggttcatccggacagattagccgattcctctgtcagccttgagggtttcaatgtctgcagtccagacccttattgtgggagtagttttctgaaaaaatcaccaaccaggatgcactactctgttgcagaggctctctgagtaaatctctcctttcatatcacggacaagaaaagctcttcacttttatcgatccctgtagataaataataaagcttcttaagctttccctatatggatgttgggaacaatttacttaactgcaattacgcaatggttttt

SEQ ID NO: 15181 - DNA, 592 bp, Gossypium hirsutum
  unsure (1)..(592): unsure at all n locations; Clone ID: LIB3829-021-Q6-K6-E7
gcctggttgctgccggnactcttgtgaggcagacactaggatcccatgtggagaggtttggggaggtaacccggccaagttcctaaggaagctaacggaagaagagatggccttcatttcccagtcagccttaaattattccaatttagctcaagttcatgctgcagaaaatgcaaagagcttcgatgaaatcgaatttgagaagatgctgctcaagaaatttgctcgccgggatgaggaatatgattcaatgctcggtgttgttcgtgagacacctcccgagcttatccttccggataatattctccccaataaagtccccaaaaccgcttaggcgttgatactcaataatgcctttctaggttaattctcttgagattcaatgttcccggatattttgttatgatctgcggatatacagagaatggctgctttttcagttccaataattttggggtacggcctcgctgagatcttaaaagttgaatcatggtgccgacattttggctacgcctagcgtctcctcgtagttgctaaactggcaaagacaaactggatgtgcaactcatctaaggtagtcttgtgtggtagt

SEQ ID NO: 15182 - DNA, 584 bp, Gossypium hirsutum
  Clone ID: LIB3829-021-Q6-K6-E9
gaaaggaaaggaaaggaagagatttgaaaatggagaagtggagagctacaaccaatctccggcgatcattgaaatcgattctcaaccgtcaattaaaatttagatatttaaatgaaaaaggagctgtcaatcgagcttcaatctgatcagagattgcaaaagtctaggacaagtgaatgcgattcagcacagatgtttcagttcagcgtcgacacttgttcagagaaatccttcattttcgacgttaaattccgatgacattagttattttaaggggttgctaggagaaaaaagtgttattcaagatgaggacaggctcgaaactgtaaatacggattggatgcataagtacaaaggctccagtaagcttttgcttctgcctcgaagtactgaggaggtggcacagattctcagatattgtaattcaaggtgtttggctgttgttcctcaagggggaatactggtcttgttggtggtagtgtgcctgtttttgatgaggtgattgtcaatgttagttcaatgactaatatcataagttttgacaaggtcagtggtatattggtatgtgaagcagggtgcatact

SEQ ID NO: 15183 - DNA, 607 bp, Gossypium hirsutum
  Clone ID: LIB3829-021-Q6-K6-F10
gtcgacccagcgttcgctctcgtcaactttaccttatttgttgatggatggaggggatctcgtcttctctgctaggatgcaactttcatgcctgctatctattttatcatatatatgtgataccatttgtcatgcggccatcatctgcatgttgtgtgcgtgtccaaagacgtcattagtttttgatgcgaggtgatggcttcttttgaagtgtttggcacaacactgcatttaaatagaaaatgcaacatggttggtattcttacggtgtttctgcttgtatgtccatttagataaggtttgcgatgcagttgaagtagcaggaaggaatgtcatgtctaccacatctgttgtgacaacaggacttgtttcacaaaggtatgcttactgagaagaaaaagttgattacgtgggagttggtatatatgatcatcatgtttatcagacgtactactggttttggtggtgtaggtatggagaaaaggcaggaaaggttacaaatgaagggcttgatgcggcaggacatgcaattgggacagcttgggctgtgtttaagattagaaaggctcttaatcccaagagtgtcttcaaacccacaactcttgca

SEQ ID NO: 15184 - DNA, 582 bp, Gossypium hirsutum
  Clone ID: LIB3829-021-Q6-K6-F11
gcgttcgggttaagttatcactgcgatctgcttactcgtggcgtgggtggtgttgaaatggagtcaagaaagctgaagatgggctagtcagcttcaatgttggtcccttcaactcattaattgcttcgcattcaaacctgagtttcttcccactcttatgcaaacctgaatttcttgtaaaactaccgggaatgtggggtggacttgttaatgaaaactcacctgctggtattggtttgttaagaaccatctgtcatcataagattggtaggggatctgttgccagctgtcctggcattatcgaagcattggttaatattgcttgctcgtctgatgattggcagtatatggcaattgattgtcttctttggttgcttcaagatccaagcacatgtcataaggtgatcgataaggcagtacctgctcttgtagaccttgcagagattacgactcttggtgatcacaaaaagcttggagataccattgttaatgttcttcaggaatgtattcaatcccaagggacgggacggagctctgtcagtaaccggacaaaagagctaattgaagaactattgagttcaa

SEQ ID NO: 15185 - DNA, 517 bp, Gossypium hirsutum
  unsure (1)..(517): unsure at all n locations; Clone ID: LIB3829-021-Q6-K6-F12
taatgctggcaaatagacggggggcgagggtgggggaaactaaaagagccattcatactgattttgagagaggatttatatgtgctgaggtcatgaaatttgaagatctgaaggagcttggcagtgagtcagctgtcaaggcttctggaaaatataggcaggaagggaaaactgggggggggcaagacggagacataatattctttaagttcaatgtttccggaggcgggaagaagtgaaatgagactctctggtgctgggttcggacttacatccctggattatcaaatccgtacgcattttgatcccatctgtttctttgcttagataccatcacttacaaaccctcaaaagccaagacagaatatgatattgggcatgcatccatctatttttattttgatctatgagtttttatttgtagcatcatattattatatatatacgcaaatattggaggatggattatgttgagtgatagatgtttggttcttcagcacctnncnnaaaaaannaa

SEQ ID NO: 15186 - DNA, 580 bp, Gossypium hirsutum
  unsure (1)..(580): unsure at all n locations; Clone ID: LIB3829-021-Q6-K6-F7
tctctcttcccaaaccaaaccttgcaaatttcagcaagnanaganggggagnnagagaacttacatagctcagnatttcgatcattcaatttagggngtttcttagttcgatccccgattacccaataccccaattttacagatcaggtctgagtgttctagttgttcggctgggtctatcctctaagtttcatgtctgatcttgacatccagattcctactgcctttgatccgtttgctgatgcaaatgctgaagacgctggtgctggtgccaaggaatacgttcacattcgtattcagcagcggaacggtaggaaaagcctgaccactgttcagggattgaagaaagaatttagctataacaaaattctcaaggacctcaagaaagaattttgttgtaatggcactgttgtccaggacccagaattagggaaggttattcaacttcaaggagatcagaggaagaacgtctccactttcctcgttcaggctggtattgtgaagaaggatagcatcaaaatccacggtttttaagtcttagctacgagagtttccgggagaattaaaaggtctatcatgt

SEQ ID NO: 15187 - DNA, 531 bp, Gossypium hirsutum
  unsure (1)..(531): unsure at all n locations; Clone ID: LIB3829-021-Q6-K6-F9
ctcattcaactctcctccttcatctccagaccgccaaaagcgacgacgtcgagcttgacgacgacgaggatctccgttttcntcgaataatctgtgggtaaaaaaagacgccgctccttctgggggggggggcaacgaagaagatgacggcgacgacgagtaccccgacctggacgacgaggagttcgggaactaccacgatttcgatgactccgattcggatccgtacaaggaacccgaaatcgacgacaaggacgtcgtcgttttgaaggaagggaacttcagtgatttcattgagaaaaacaagttcgtgatggttgagttctacgcgccgtggtgtggccattgccaggcgttggctccggagtacgctgcggcggcgacggaattgaagggagaagaagtggtgttggccaaggtggacgccacggaggagaatgagctggcgcaagagtatgacgtgcagggtttccctactgtttacttctttgttgatggagagcataagccttaccctggagctagaaataa

SEQ ID NO: 15188 - DNA, 591 bp, Gossypium hirsutum
  unsure (1)..(591): unsure at all n locations; Clone ID: LIB3829-021-Q6-K6-G11
tgggtatttgtgccccttgagggggggagggttggcggaggcaagatatcttaaattcaataccgtnaaggggcggtncnncacaatttgggttctaccagtcagtgnnnaaaaagttaacnccagnnattcttatnnccttaatnntttatttggnnatctcattttctcttgtatgtgnnttttctnnttttgacccttttttgcttggggggcgtgaaaannacgcctcagnnatgttgnnnaaaagccttattnnnctggtatttgtgnaatgccanntcatttnntcttaaagnacaagnannatgaccaaaagnaagtgcatttagttgtnanngtttcccttttnntccaaaaacggnagaaatnngtgattttgcttgagnntagcaaagaatttaatnnaaaagttgagatagcttgnngttaatcactttatgtactaacatncnntgcaactcttttgggatnnttaactagtnnntagtggcattcattaggtnnntatttttttnnttacagggnaggngnngggctttgtnntttcgnntcggctttgaaactttaggaatnngaataanntaaggg

SEQ ID NO: 15189 - DNA, 460 bp, Gossypium hirsutum
  Clone ID: LIB3829-021-Q6-K6-G12
ggaacccatattggataaagggggggtgggcgtggggtcactacaaagatgtgtggcggcgacggcctcaggatccaaaatgcttttggatgaaggtcggaattactacgggcacgcaccagcggtggtcgatctgtgcttttttcaggtgctattgttccaagtaggtgggggggggtgatgaaattgagtggtttacctggacctattggagttaaaccttaatcttttgcaaacctaaacctaagtggaggtggcgtcaaaggttagtggtatgtacaattttcagcaataatgatagtatttattcaacattgtagtctcttttaaagcttgagatctttgtataggaaaattttccccttttctcaagaaaaagtaagatagaatttggtaagaccagttttaaaagtaactgccccattgaaatggaaaacggttgcctatttgatcgatttgt

SEQ ID NO: 15190 - DNA, 609 bp, Gossypium hirsutum
  unsure (1)..(609): unsure at all n locations; Clone ID: LIB3829-021-Q6-K6-G7
cgttctggtttaggttcaattatttccaagnagttgtcttagctggngctttgcgntcctcctggttattataagagctggcacattggggttcgtgctaaggcttcaaagaagcttgttgctttcattactggtgtccccgcaagaataagggtgcgagatgaagttgtgaagatggccgagatcaatttcttgtgtgttcataagaagctgagatcaaaaagacttgcacctgtaatgattaaggaggttactaggagagttcatttggagaatatttggcaggctgcttacactgccggtgttgttcttccaacaccaattactacttgccagtactggcatcggtcgctgaaccctaagaagcttattgatgttgggttttctaggcttgggcctaggatgacaatgagtcgaaccatcaaactctacaagttacctgattctccagccacccctgggttcagaaagatggagcttcatgatgtccctgctgttacaaggttgcttagaagctacttgagccagtttgtcgtttctccagattttgatgagaacgatgtggagcactggctgcttcccaccgatggcgtcgtggatagttacttg

SEQ ID NO: 15191 - DNA, 557 bp, Gossypium hirsutum
  unsure (1)..(557): unsure at all n locations; Clone ID: LIB3829-021-Q6-K6-G8
tctgttgtagcaatcaaaacatcaggctagctgctttgcaggaaggcctgcagaaanagaacattgcagatttctgggaaagaagctttgatattgagttcattacatcatccaaatgttgtttctttctatggtatagttcgtgatagtcctgacggattcttagctactgttggggaggtcatggttaatggatccttgaagcagtttttacagaagaaggacaggactattgatcgtcgtaagagactcatcatagctatggatgttgcatttgggatggaatacttgcatgggaagaacattgtacatttgatttgaaatgtgaaaatttgttggtaaatatgagagatctgcagcgtccagtgtgcaagattggtgatttgggcttatcgaaggtcaggcagcatacattagtttcaggaggtgtttgtggaactctaccatggatggcacctgagcttttgagtggtaaaagtgacatggtatctgaaaagattgatgtgtactcctttggcatcgttatgtgggagttactcactggtgaagaaccttat

SEQ ID NO: 15192 - DNA, 598 bp, Gossypium hirsutum
  Clone ID: LIB3829-021-Q6-K6-G9
gcgttctgttcatacatgcaccgtgatgttaccggatgaagaacagtaaaaaattagtccaatcgacggttcaaaactacgggagcctcgacatcatgtttagtaacgctgggacagttagcaactcaattcaaaccgtccttgaactagacttcgcagcgtttgaccgccttttcaccgtcgatgggggcggcatggctgcttgtgtgaaacacgccgcacgagccatggtggaactgaacgtgagaggaagcatcatttgtacggcgagcacgactgctagctgcggtagtgaaagggacactgattataacatgtcgaagcatgcggtgattggattgatgagatcggcaagcaaacaacttggagagcatgggattagggtgaacagtgtgtcgccgttcattgtgggaaccccattactctatcattacctggggacggaggcggaggtggagcagttgtttgagccctacgcacggttgaaaggggtggtgctgaaagcgaagcatgttgctgatgctgtggtgtttcttgcgtcacaggactccgaacttattaccggacatgactcggtggtggatgctggttttcttgt

SEQ ID NO: 15193 - DNA, 597 bp, Gossypium hirsutum
  Clone ID: LIB3829-021-Q6-K6-H10
tcggtgatattctgtgccaaattaacttgtagcttgggcgggggtacccaaaaccaatgctcgccttccaacatgtactctgccagtgaaagatttaactgaggttctatctgtcgcccttatagacccagcaattaaaatcagacgcctgcttaattcaggcgtacccactattacacagggagcggcagacataccgaccccattcacagccaagcacaacctgagcagttcgctttatacactctgcttgacggacatattccaagaggaagatcatggaggagcttcttcggaagggacaagaagaggaaccagcaactacacgatcactatagaacccgcattaacagctgcggaagtctatacagcatagaagctactttctaagcttacaagaatgctgaaaacgcacttcggggcattcatccaaacctaaacgctaatagcgcaataagaagggcataaactacaaaatcctaacacacactgaatttactgctgacaactgagattgatttgtaatccatgatgctatttttatatttgttgttacgtttgattagaagatctgaaaccaatatacccaatacatag

SEQ ID NO: 15194 - DNA, 616 bp, Gossypium hirsutum
  unsure (1)..(616): unsure at all n locations; Clone ID: LIB3829-021-Q6-K6-H11
gtcgacccagcgttctcggncgcgtgggcagcaaccaaacaggggcggggggggggttctaaaactatccaagcacactggtattaatcaatggctcgtacaaagcaaacagccaggaaatcaaccggtgngaaaagctccacgtaagcaattggcgaccaaagccgcgaggaaatcagctccagccaccggggggggggggaagcctcaccgtttcaggccaggaacagtggcgttgagagaaatcaggaagtaccagaagagtaccgagcttttgatccgtaaacttccgttccaaaggctagtgagggaaatcgctcaagatttcaagacggatctgagattccaaagtagtgcggtggcggctttacaagaagcggcggaagcgtatctggttggcctgttagaggatactaatctctgtgctattcatgccaagagggttactattatgcctaaagatattcaactggctcggaggattagaggagagagagcttaaatgatgtatatgatgatttgctttgaatgctttctgcttttagaatctgtgttgttaggttttctctagatgtagatctctcagtttagtggcttgtgttcagtgattgatgaa

SEQ ID NO: 15195 - DNA, 578 bp, Gossypium hirsutum
  unsure (1)..(578): unsure at all n locations; Clone ID: LIB3829-021-Q6-K6-H12
cggncgcgtgggtttgtcccttggtggatgggaggttgccccctcatggccgccgctgatgtcgagttccggtgcttcgtcggagggctcgcatgggccaccgacgaccgggccctcgaagaagccttcagtgcgtttggtgaaatcgtcgaatcgaagatcattaatgatcgtgagactggagagatcccgaggctttggattcgttactttccgtgacgagaaagctatgagggacgcgatcgaaggaatgaacggtcaaaatcttgatggaaggaacatcaccgtcaacgaagcccaatcgcgcagaagtggaggcggtggcggaggatttggaggaggaaacggtggttacagccgcggtggaggcggcggcggatatggtggtcgccaaggaggatatggtggcggacgccgtgaaggtggatacggaaatggtggagggtatggtggtggtgggtacggaggtggacgccgtgaaggaggatatggtgacggcggatctcgttactcaaaagcggcggtgcatctgaaggcagctggaggtcttaagtttaggtttcaaagtgggcttgggc

SEQ ID NO: 15196 - DNA, 607 bp, Gossypium hirsutum
  unsure (1)..(607): unsure at all n locations; Clone ID: LIB3829-021-Q6-K6-H7
gcgtttggtttgatccaagtctcgagactgaacccgattttgatttggatatcaaagaagagttcaagaagaatgttcaaaattcggaaaattgaagcatatatatgtggacaggaatagtgctggttttgtatacttacgatttgaagatgcgcaaggcgcaataaatgcgcaacggaacttacatggaagatggttcgccgngaaaaatgatcacggcaacatacatgatacctcaaacctacgaggcaaagtttccagatagtaacagataattgaatggtgtttagtaaacctaaactgttgaaatcaagagggtctaattcccctttgaaatatatatatatctatgtcatacgcgcgcgcgcgtgctcacatatatatattactgagatacatcagcaggttgggacttgtatggggaaattaaaaaaatatttggaattagatgggtactgtttctactaattttatattcccatgtttggttaatgtactagtggttgccttttgcctttgtttagttggagaagttataaagtatcaatgtattgttattttttttaattgtaataagcacaatacaattaaagtataaatacaagtc

SEQ ID NO: 15197 - DNA, 584 bp, Gossypium hirsutum
  unsure (1)..(584): unsure at all n locations; Clone ID: LIB3829-021-Q6-K6-H8
gcgttttagcaaanaaaatgtgcctaatgaaagctctgtgtatcaattagagtcaatcccatgtttgatgcatgaattgaagaatcttggactgccataattaccatacaaatccaaatgatttcatcctttttctcccattcactatttactagctcaaattttcccttcttcctttaacgtgggggtttcatacagtttttattttcttttaaagccccctctctttttcaacatatatagctagtgaaaattttatgcttttgtgtggctatgattaaaaagcttattcatgagtataccgacatgcaaagcgaaaggtacgttgggagatagttgtaagcaagcgttgcttgggtagctgctatttgtgacccattaatttgcttgattatggaataaccaaatgacacaagacagggtgtttaacattttcatacatttcttgagcaaatgttggcaagttggtctttgtttttatgctctattcttggcactcttacatgtttagatttaaccttaaatatccaaaaatagatccattttgaacaagaagtatgcatatataataaacaggtgtttgc

SEQ ID NO: 15198 - DNA, 426 bp, Gossypium hirsutum
  Clone ID: LIB3829-021-Q6-K6-H9
aaaaacccgcattcagcaaccggggggcactcattcgacaagtccgccatgggtaaggttcatggatctttagctcgtgccggtaaggtgagagtcaaacacctaagtggctaagcaagacaagaagaagaagccccgtggtctctcttacaagaggatgcaatacaaccgggggggggtgaccgcagtggtcggattcggcaaaaagaggggacctaactcatctgagaagtaagaactatgcaatttaaaaaagttattgtttgaagcttttatggatttaatctgtatttttccctgtttttttgtaatgttttatgatacttatttttatccactggtagtaaggatgaagttgaacttgaagttttgttatctaaatattatgtgattttgatattagttaagcttaattcttggttcatt

SEQ ID NO: 15199 - DNA, 582 bp, Gossypium hirsutum
  Clone ID: LIB3829-022-Q6-K6-A10
cccagcgtccgcccagcgtccgggggtactgggtgtctgctcaaaaccttcaacaattcagctgataccatagataatattgcagcgcaggttggagtaggagatacatccggaggcagtactacacccaatgatcattattgctggatgcgccctgaggacattgattacccgcgccctgtctatgaatgtcacagctgctccgatcttgctgctgaaatggctgctgctttggctgctgcttccattgttttcaaagacaacaaggcgtactctcaaaagcttgtccatggtgcacggacagtctttcagtttgccagggatcaaagaggcagatatagtgctggtggttctgaccctgccctcttttataactcctccagttactgggatgagtttgtttggggtggagcttggttatactacgccactgggaattcttcctaccttcagttggctactcatcctaaacttgccaagcatgccggtgcattctggggaggcccagattatggcgttcttagctgggacaacaagcttgctggtgctcaggtgcttctgagccggttgagattgttttta

SEQ ID NO: 15200 - DNA, 583 bp, Gossypium hirsutum
  unsure (1)..(583): unsure at all n locations; Clone ID: LIB3829-022-Q6-K6-A11
tatgccctgnccattcgtggggggtgggcgtggtacctaaaatttatttattattgataatgcgtcaccttcaataatgagttttggccattgcatgtcgatgccaatttgggttgctgtcctacaagcgattgcttttttttttaaagctgataccacttgttggtgggggggggagtatgataagagaactgtaccttcactatctttggctacgatccacactgccgattgacaaagatttccatcatatgctgcgttgaagtttatcttctcgaactgaccagatctgctcgccttctcatgtattctcttgtttctttctccccaaattgcccatagagcacaacaaaaaatcctacactgggatggagtagtctgttcgaaaacccaggacactcacggaataggtggttcatggtttctgcttcttttccacatcgagggcagattgtattgttagatagctttctataatgtatattaacccctataactagataattccacgatattttccaagctgtaattctgatcttacaaagtagactaaatagccaaattttttgtaaaatttcctata

SEQ ID NO: 15201 - DNA, 579 bp, Gossypium hirsutum
  Clone ID: LIB3829-022-Q6-K6-A12
cccagcgtccgtggtctgtgtctagtggaagaatggcaaattcaatccggcaggatttacgatctttgcgtgtctttagcgtggatccacctggttgcaaggacattgatgatgcactacactgtacagctcttcctaatgggaactatgaagttggagttcacattgctgatgtaacaaattttgttcaccctggcaccccgctagatggtgaagcttcccagaggggcacatctgtctaccttgttgagcgccggattgacatgcttcctaaacctttgacagaagatatatgttcacttagggctgatgtagaaaggctagccttttcagttatttgggaaatgacgcctgacgcagagattatctcgacaagattcacaaaaagtgttatcaaatcttgtgctgctttgtcttatgttgaagcccaggctaggatggatgatagtcgactgatggacccgttaactacagatttgagaaatatgaatgctttggctaagataatgaggcagagacgtatcgatagaggagccttaactcttgcttctgccgaagtcaaatttcaaattgatactg

SEQ ID NO: 15202 - DNA, 605 bp, Gossypium hirsutum
  unsure (1)..(605): unsure at all n locations; Clone ID: LIB3829-022-Q6-K6-A7
gtcgacccagcgttcgtttttgagattttaagtggagagcccncaatgtgaagtacacagagaatgaaattcagtctgtttacaactattgaaactacagagcttgttcatgagaacaaaatggaacctatcaatgggttgttaaacccaaaactgtcaaatatgaattcaagactgatatccatgtccctaaattgggggtgatgcttgtgggatggggaggaaacaatggttcaaccctcaccggtggtgttatagctaacaaagagggtatctcttgggctactaaggacaaggtacaacaggctaattactttggttcattgactcaagcatcaacgatccgaattgggtcttacaatggagaagagatttatgctccatttaagagtcttcttcctatggtgaacccaaatgatattgtgtttggaggatgggacattagtgacatgaacctagctgatgcaatggctagggccaaggttttcgacattgatctgcaaaagcaactgagaccctacatggaatccatggtcccactccctggaatctacgatcctgatttcattgctgctaaccaaggtgaacgtgccaacaatgttatc

SEQ ID NO: 15203 - DNA, 590 bp, Gossypium hirsutum
  Clone ID: LIB3829-022-Q6-K6-A8
gcgttctcccagcgtccgatttgaatgaagcctcaaataaagctaatgcttttgctgttgacttgttgagacgtacaatagttgtagtggaggattctttatttaatggcgcttcctcttttggatattattatgggtctgccaaggaacgtcttccaccagagatcaaagatgcattaactctttacgaagagagaaccggaaaagccttaaagcctgttggtgcagccctgcaacaggtttacaccggcattgagggggtggaaaggagtctagggtttgacccgagtgatcctattgtcccatttttccttctttttggcacctcagccactttatgggtgttttactgggtatgggcatatggtggttactctggggacttatctcctaagctaactttggagctcttgtctggaaaggagaatgctttccttattgatgtccggcctgaggtccttagagagagagatggcattcccgatcttcggcgagtagctcggtttcgttatgcatgtgtatctttacctgaggttaatggctttatgggtaaagtattaaagagtggaagggaccttgatgactccttg

SEQ ID NO: 15204 - DNA, 587 bp, Gossypium hirsutum
  Clone ID: LIB3829-022-Q6-K6-A9
gcgttcgcaaattgcattcaattataacagcatctgatggggcaatggttgcaagaggagatcttggtgcagagctgccaattgaggaggttcctcttttgcacgaagagacattagaacatgtcgaagcatggggaaagctgttattgtggcaaccaatatgctggaaagcatgattggtcacccagacaccaaccagagcagaggtatctgacattgccattgctgttcgtgagggtgctgattctgtcatgctttctggagaaacggctcacggaaagtttccattgaaagctgttaaagtgatgcatacagttgctctacgaactgaggcaaccatatctggcggtgaaatgccacctaatcttggtcaagcttttaagaaccatatgagtgagatgtttgcatgtcatgctactatgatgtcaaatactcttggaatctcaactgttgtcttcactagaactggtttcatggctatattacttagccattatcgtccttctggcactatttttgccttcacaaatgagaaaaggattcaacagagattagctttgtatcaaggagtatgtcccatatatatg

SEQ ID NO: 15205 - DNA, 558 bp, Gossypium hirsutum
  Clone ID: LIB3829-022-Q6-K6-B10
tccgttgtcagatgaaatgtagtagcaagagaagtaacctagtagtctaattttttgtgcttgacccaactcatttggtatctgatgaagaaagaagaaaaagggaaccacacttggaaaaagcttggcacttgaaagttgaatctctggggtttataatattaaaagaccaatgctcctttcatcagatatggttgtcccagcatggaggaactgcagagctatagtcaagaatataagaaaagattagatgaagctggacaacgaagagaaataccagatgatttggctcttcaggtatcatctcctggtgcagagagaatactaaaagtaccagatgatttagatcggttcaaagacatggctatgagagtttgttatattgaagacgctgggtctaattatactgaaaagagtggagtcttcttactagatttggtcgaggaagagaactgtgtatggaagttggcagaggtgaaggagaacagggaccccaacagcaagggtagaccatttagtcgtaaacaaaaggattggagattaaaactgccttttgac

SEQ ID NO: 15206 - DNA, 517 bp, Gossypium hirsutum
  unsure (1)..(517): unsure at all n locations; Clone ID: LIB3829-022-Q6-K6-B11
tcgccctcgncaaaccacgaaaggcaacggctagatgaccagctgcagtattggttcctttatctatgaaatcctcatcctcttactcaagtttcttgagtgctgagaagcaagaagaacgaagaatggggaccgcaaggacatcggtggcgttgtcaataagaagagctttgacttcatggggggggagggtagggtccatggtggtggtctcatgtccttgcttggtggaaatctaaagaacccctttgaaggaatttaaagtcaaatcatgtagaaatctagtttggtttttttaggttgttcttgtaccttgaaattattcttaaaatttggttgccgtcaaaagacttgatacacatatacacggtttgtgttgattgatgaaacccagcatagaaccagttacgcatggattttgtaatctgttgtgttctaataacgtcgtaatagtcatagaccgttggctatatatctggttacattattatttgcccgcattgcaaaggcttcagcc

SEQ ID NO: 15207 - DNA, 586 bp, Gossypium hirsutum
  Clone ID: LIB3829-022-Q6-K6-B12
gcgtgggttttgctgctgggggcgtggtgggggattcatggggtccaatcagactccagcagaagaaagttgatgttggtcatgacctctcagttgataatcagagcaacatggaaagtaaggaacaggaagtgcatggagattctcagagttctgatttgaatcgtgggggggaggggcacaagagaggcaagcctagagctaaaagaacacgctctgtgaaggcagttgtcaaagatgctgaagctattattgggaaaaccttagaatcaaatgaacttgagcatcctgatgaaagcaggggtgaatctggtcttgctgatgggagagcaactagaaatgcaaggaagcggaatcgtgctcaaacatctcaaactcaaacagcagacactgagcaagatggtgatgacagtgaaggacgttctgatagtgttgtggggggccagcgaagaaagaagcatcaaaaagtggttctggctatgccaatacctggcaggaaaagatataatctccgacggctcaaaattggggtcacagttgctaaagatacagcagatcatgttaacaactctgaagctcccgtgcc

SEQ ID NO: 15208 - DNA, 554 bp, Gossypium hirsutum
  unsure (1)..(554): unsure at all n locations; Clone ID: LIB3829-022-Q6-K6-B7
gcgttcggtctgcacaacanatacggaagctggggagtagctgagaggttggacctggtaggcccgattgtggagcagccagggtataatctattgactaggcacaggttgaatccgagtaccttcctctgtatactaactatggtctaggtcttacaacatggagtccgcttgcttctggagggcttnactggaaaatacaacaaaggaaatataccatctgacagtcggtttgctttggaaaatttcaaaaatcttgctaaccgttcactaattgatgatgtgttgaggaaagttaatggactgaagccaattgctgatgaacttggtgtaccattagctcaacttgcaatcgcatggtgcgctgcaaatcctaatgtatcatcggttattactggtgctacaaaggaatctcagattcaagagaacatgaaggcacttgatgtaatcgcattgctgactcctgctgtcatggagaagattgagacagtttttcaaagcaagccaaagcgtccagattcttacaggtagacgcgggatactgttgcttcctt

SEQ ID NO: 15209 - DNA, 587 bp, Gossypium hirsutum
  unsure (1)..(587): unsure at all n locations; Clone ID: LIB3829-022-Q6-K6-B8
gnagtacttcgagnaagccagctgattcaagcgcttgcaggagcgtccctttttacattaccaggttggagtaacgccagagggagtggaagtgccaagaagcttggttgataaagaaatgcaagagaagttaagggcaatgcccaaagaacaccaaccattaactcccaaggccctgatccgaagtggcgatatatgtggagagtgggccctcgcccttcaaagacccgctttcaggaacttaattcagaacctgtcatacctgaaggtttccctgaatggaaagagaccatggactcatggggatacaaaatgatatcggcaatagaggctgttgctgaaatggcagcaattggatttgggttgcctaaagatgcattcacttcccttatgaaacaggggccacatcttctagctccaacagggagtgacctcaaacgttatgggcaggagggcactgtttttgcaggctaccactatgaccttaactttctaactattcacggcagaagcaggttccctggtctaaacatctggctaaggactggggaaaagattgaggtgaaagttccaataggatgtcttct

SEQ ID NO: 15210 - DNA, 588 bp, Gossypium hirsutum
  unsure (1)..(588): unsure at all n locations; Clone ID: LIB3829-022-Q6-K6-B9
cagctattacgtgngaaaccttttttttgtgtagcgattctcagttagtcttttctttaagcttacagcttctctccagagttttataatgggtaaggagaaggttcacatcaaccttgttgtcattggccatgtcgactctggcaagtcgaccactactggtcatttgatctacaagctaggtggtattgacaagcgtgtgattgagaggttcgagaaggaggctgctgaaatgaacaaaaggtcattcaagtatgcttgggtgcttgacaagcttaaggctgagcgtgaacgtggtatcaccattgatattgccctgtggaagtttgagaccaccaaatactattgcaccgttattgatgcacctggacaccgtgactttatcaagaacatgattaccggtacctcacaggctgactgtgctgttctcattattgactcaaccactggtggttttgaagctggtatctctaaagatggtcagactcgtgagcatgctttgcttgcttttaccctcggtgttaggcagatgatttgctgctgcaacaagatggatgcaacaaccccaaagtactcaaaggcaaggtt

SEQ ID NO: 15211 - DNA, 573 bp, Gossypium hirsutum
  Clone ID: LIB3829-022-Q6-K6-C10
agggaacccaattcttcgcttttcagcttctctcgcttccatttctccgtttttccccctccggcaatggctatcgattctgattctttcaaacaatcacttctccctagcttcctttactcttctgctcccaactcattctctctggatcgactcctcaacgccaacagccctgctttctctgcttcacgctccactatacccggtgcccccgcggcctcttcctcgccgtcgatcaaggcgagaactttcatgatcccctcccccaatgagcccgggaagaagattgagatgtattcgcctcagttctacgctgcttgtacctttggcggtatccttagctgtggtctcactcacatggccgttactcctcttgacctcgtcaagtgtaatatgcagattgaccctgcaaagtacaaaagtatctcatctggtttcggagttctactaaaggagcaaggagtgaggggcttcttccgtggttgggttcctacccttcttggttacagcgcacagggtgcttgcaagtttggattctatgagttcttcaagaagtactattctgaccttgct

SEQ ID NO: 15212 - DNA, 585 bp, Gossypium hirsutum
  unsure (1)..(585): unsure at all n locations; Clone ID: LIB3829-022-Q6-K6-C11
cggncgcgttttgttcggactgcaagcggaacaaggggtcgttttcgaccattccgccggcgacaccgtctgttcggagtgcggcttggtcttagagtcgcattctatcgacgagacatcggagtggagaaccttcgccaacgagtccggcgataatgatcccgtccgtgtcggcgggcccaccaatccgcttttggcggatggcggtttatccaccgttatcgctaagcctaatggtgcttccggggagttcctctcgtcctcgctgggtcggtggcagaatcgcgggtcgaatccggatcgggggttgattctcgcttttaagactattgctacaatgtctgataggttgggtcttgtcgcgaccatcaaggatcgagccaatgagatatataagaaggtggaagaccagaagtctagtagaggaagaaatcaggatgcattgttggctgcttgcctttacattgcttgtcgacaagaggacaagccacgcactgtcaaggaaatttgctctgttgccaatggagccacaaagaaagaaattggccgagcaaaagaatacatagtgaaacaactgggattgga

SEQ ID NO: 15213 - DNA, 574 bp, Gossypium hirsutum
  unsure (1)..(574): unsure at all n locations; Clone ID: LIB3829-022-Q6-K6-C12
taggagatggactggggggggggggggtggtangaaaaatttgactggaacctcaagtgatgaanctgatgcagatgatgaatggacagataaaagtaccagggaacaggcttctagtgcttctgngaaaagcattttttttcttgtctagtgatgaaaggaatggggggggggggggtgccannactttnatnccacctcccannccatcatctaattccttttcaaattcantacatgcaaanatcaagtttggatcttcatctagccgaaattcatccatgcgaagagctgaaatgtctgcatcaagcaatgcatcaaatagcagaagtggttcttcctttaaggcagggggatcctcaaactcaaagacaggaaacagtagtaatttaagttccaattctgatgctcgtaagccacgtagaaagaggagaccaaaaaagagaaagcaacaggcatgacaaaaacgcagctttggttctgtccatgagaaaacaagtggtgttatacccagacttgttttgaaattcaacaacgctttttgtagtatgttccaagaatagttttagttttg

SEQ ID NO: 15214 - DNA, 570 bp, Gossypium hirsutum
  Clone ID: LIB3829-022-Q6-K6-C7
tgcaagtgcaataggagttgtgtcagcaattatagacaatgtcccacttgtcgcagcaacaatgggaatgtatgatctcacttcatttccccaggactccgagttctggcaacttgttgcatattgtgccggtactggtggatccatgctagttatcgggtctgcagccggagttgcatacatgggaatggaaaaaatcgacttcttttggtatttccgaaaggtgagtggttttgcttttgccggttacgctgccggtattgctgcttatttagcggttaataaccttcacatttccttaccctcgactttagctcaagttcctttcctttccggttcgtaaattacaaagatatacaactatttttcataccatttggataagtttggtgaagacatgatcttcccttgcttacaattcacgaaattttgagggaataaaaggttcaaatagttatgaaatctcatgtattgtccacaaacattatgtaaagaccatgaattaagtcatagtgacgtgcatgtgaagagtgaatgtgtatcaatggctatgccgagcttgagaacgtg

SEQ ID NO: 15215 - DNA, 571 bp, Gossypium hirsutum
  unsure (1)..(571): unsure at all n locations; Clone ID: LIB3829-022-Q6-K6-C8
tatgcagatccaagngaaattatgttgatgatgaggccaagttgacccttcatggtcttgtacagcattatatcaaattgagtgagatggagaaaaatcgcaagttgaatgaccttcttgatgcgttggacttcaaccaagttgttatctttgtcaaaagcgtgaaccgtgcagctgagttgaacaagttacttgttgagtgcaattttccatccatatgcattcattctggcatgtcccaggaagaaaggttaactcgctacaaaggttttaaggaggggcataaaagaattcttgtggccacagatttggttggaaggggaattgacattgaacgtgttaacattgtcatcaactatgacatgcctgattctgctgatacatacctgcacagggttggcagagctggtaggtttggcaccaagggtcttgcaattacgtttgtttcttctgcttcagattctgatgtgctcaaccaggtccaagagaggtttgaggtggatataaaggagcttcctgagcagattgatacatctacatacatgccgtcataaaggaagttcgttctgca

SEQ ID NO: 15216 - DNA, 574 bp, Gossypium hirsutum
  Clone ID: LIB3829-022-Q6-K6-C9
aacgaaccacctttctctctttacaaaataaccagaaaaaaaatatttaaaaaagaaagaaaaagggaaaaatctctcttttttcatcaatcgtgaaagcttctaaagctttttcgatcagaacccaatcgaggaatatggggaagaaaaggaagtcaatagcgacgagccttgatgaggtggatcggactatgtatgcttcgttttgcagcgctgctaactctttgtctcaactttatactcaggctatgaaccagcagaaactctcctttcaagccggaaaaggccatagccttgaaaaactttatcagtggatttggagacaacaagagggaggatcaagggtaacaacaatggatatcctcaattaccttcagaatgagatagactactgtggtgaggagccatcaatgtcacctagagcaccaagccaacagcaccaatcccagccaacaatgcagttcatgaataccagtttcatggtctcttcaggctcatctggccaaactgctgtgcagggaactcgccctgattactctgatcagcagccgaagaattctattttctcaaacgc

SEQ ID NO: 15217 - DNA, 573 bp, Gossypium hirsutum
  Clone ID: LIB3829-022-Q6-K6-D10
ggcacttcaagtcggttcaagaaacttcatgcaatgccttgatgccaattctgagcatcccattcccatctctgctttttgctcccaaaccaactcttcatttacttctgtcctcaactccactgcacaaaacctcaggtacttgatgccgttagtgccaaagcccgaatttatcttcatacctgtctatgagtctcatgccaaatctgctgttatttgtgcaaaaaggcttgcaattcacctaagattccgcagcggaggacatgactatgagggcctctcatatgcatctgaaatagagacacctttcattttgatagatcttatccagcttcggtccattaatgtcgatatcgatgacaatagtgcttgggtgcaagctggtgccacggtgggggaagtttattatagaatctctgagaaaagcaagactcatggcttccctgccggtctttgctcaagcctaggcattggtggacatataacaggaggtgcatatggttccatgatgagaaagtacggtcttggtgcggacaatgtccttgatgctcgaattgttgatgttaatggcga

SEQ ID NO: 15218 - DNA, 332 bp, Gossypium hirsutum
  unsure (1)..(332): unsure at all n locations; Clone ID: LIB3829-022-Q6-K6-D11
gcgttcgttggcacttctttgcttcatggggggaaggggggaaatttctgcaactttcgtctctgacatggnaagaagcattgatgctactaaatttcatcgatacattaaagtgaaatagaaaacatttaatttgtgtggaaatgctgcaattgccacatagacccactgcgtgttcaaaggggatcactgtaatatactattttatttttcacttacgaacgtgtctcggcatataaaattatgctattgataccattcgaacatctccacgcttctttatttagcagtgaaaatggattataagaatgaactaagttttttatttgatt

SEQ ID NO: 15219 - DNA, 579 bp, Gossypium hirsutum
  unsure (1)..(579): unsure at all n locations; Clone ID: LIB3829-022-Q6-K6-D12
gcgttcggtttgaaaaaggagtccacaccggggggggggggggtttgctttgcatgcttttcatttcttcagtgacaccaattcttgggtgtggttcatgtggngaaagcaccacacaagcatcgaaagcctaagggaaagtcccctaaaggtcccatcactttgcctccccttgtggaagccgggggggaagttgccaccggttgttcctccaatagttaagccacccattgacctccctccggttacagtccctccaattaacctccctccagggacggttcctccagtaactaagccaccaagtgggaaaccctgcccaacaccaccaaccaaggacacttgccccattgacacactgaaattgggtgcttgtgtggatctgctgggagggttggtgcacattggactaggtgacccggttttgaatcaatgttgtccggttctttcaggacttgccgagctcgaagctgcggtctgcttgtgcaccaccctcaaacttaaggttctcaaccttaaaatttatgtgccactggctcttcaactccttgtcacatgtggngaaaacaccccctcctg

SEQ ID NO: 15220 - DNA, 455 bp, Gossypium hirsutum
  Clone ID: LIB3829-022-Q6-K6-D7
ttttgtattaagaatcgccctttagtgatcagtgaggtgaagaaaaagtcttgctgtggtggaaactgcggttgcggctccggttgcaagtgcggcagcggctgcggcggttgcaagatgtaccctgagatgaactttgctgagcaaaccacaaccgggacacttgttcttggcgtggcaccccggaaagtgcactttgatggagctgaaatggaaactggggctgaaaatggctgcaaatgtggagataactgcacttgcaacccttgcaattgtaaatgagaaaaaaaagctaagcatattatggaagctgatctaaataatatatgatgtatttgggtttttactattagaataaagcagctatggttcattaggtgttttgcttcttgtatccatggttgcttggtttgtgtatgtgtgtgtgtatatagtgaaatgaaattattttaact

SEQ ID NO: 15221 - DNA, 591 bp, Gossypium hirsutum
  Clone ID: LIB3829-022-Q6-K6-D8
cgtttttaaaaagacaggctgtaaattcttttgaaccggtaataaggatgcttcttcagcatcgtctctgttacctactgctgttgtggagagaatttatgagcgacaaccggaagtaaaagttgttgatactggtcgaagggtagcagagatagatgtttatactacagacattgacaaacaggcgtctactttttcgtcaggttacccattcaatgggagggaggaaagtggaaaggcttctggcccaacggatagggagagatttgaagtgaatagtaattatggtggttcttcgagccaaagagtttattcatcaaattctcaaaattcagctgatacagaagagaaagtgccaaaggtgtcaccacctcgtagaaaagcaattagagaagaaaaactggaaaagtcgaggaattgggccaagaaagatggaggaggatccgattcgtctgcttcaaactcgaggcaggtgaatgctgttaataataacgaaactaataccattggacatagacaatatgatccagaagaaaaacaggaaaagacgaggaattgggccaaaaaagatggagatccgatttttctgct

SEQ ID NO: 15222 - DNA, 570 bp, Gossypium hirsutum
  unsure (1)..(570): unsure at all n locations; Clone ID: LIB3829-022-Q6-K6-E10
cactcacctagnacgtcttgtgggccaagcattgtttggtgatggtgccgcagctgttataatcggggcagaccccgtgcccgaaatcgagaagcccatgtttgaactagtctcagcagcccaaacgatcttgccagatagtgatggtgcgattgatggtcaccttcgtgaagttggtcttacatttcaccttcttaaggatgttccggggcttatttcgaagaatatagaaaagagcctggtagaagcatttcaaccattgggcatatccgattggaactcccttttttggattgctcatcctggtggtccagcaatattagatcaagtagaagccaaattagcactgaagccagagaagctacgagccacaaggcacgttctttcagagtatggtaacatgtcaagtgcttgtgttctatttattttggatgagatgaggaagaaatcaagggaagatgggcttcagaccacaggagaaggattggagtggggagtgctctttgggtttggacctggcctcactgttgagactgttgtgctccatagtgttgctgcttaaagttaaac

SEQ ID NO: 15223 - DNA, 551 bp, Gossypium hirsutum
  unsure (1)..(551): unsure at all n locations; Clone ID: LIB3829-022-Q6-K6-E11
gcttggcttgtggggggggagggggtgttaaaaaggcttttgatctgcttgaaatgctgaanaagaagagaatgctttctgcgataaaggagaaacagctcaaggatgggngaaaaggaattttctcaggctatccttgatgatcgcaccaagaaagcagggggggggggtcgtgatgctgcagctcgtgcacggtatactcaacctgcagcacctattacttgtgctacatttgctcaaaatgttattgaaggaagggcaaatgtatcgcaagcacatgaccacaaacaccagccaatgatctttggaccacaaagccttataggtgggagcctaacaagtgaaagggaaaggatggcagcacaggttttccaacctgcttatcggatgccaactataagcatcgaggaagctggtctgagggagatggaaatgatgaataagtggcaggagaggaatgcaaaaatgtttgaagaagctaactcagcatggtacaaggacaaaccaaagatgggaccaagtgaagatgatgaagacgatgatgctgccca

SEQ ID NO: 15224 - DNA, 249 bp, Gossypium hirsutum
  unsure (1)..(249): unsure at all n locations; Clone ID: LIB3829-022-Q6-K6-E12
cgtgggcggccgcgtgggggggaggtccggcagggaacaaaaatttcgttgatcggttactgtgaagagaactgtgaaatgatcctagtttatgattatatggcttatggaacgttgcgtgagcatctctacaaaaccttttttcttcctcttccatggaagcaaagggggggggggggcattgntgctgctcgcggtttacactatcttcacactggtgccaaacacactatcattcaccgtgatgtg

SEQ ID NO: 15225 - DNA, 530 bp, Gossypium hirsutum
  unsure (1)..(530): unsure at all n locations; Clone ID: LIB3829-022-Q6-K6-E7
gcgtttcggngnagtgttgaagagatgtcttttcatatacgtaccctaggcttgatatggaggtgtcngaagcacatgaaccatttactgaaggcaccattctgtgtacatccaaaaacaggtcgtgtttgtgttccaattgacccaaacaattgtgatgagtttgatccaaccacagtgccgaccctatcccagcttctggaagaactgaacaggggaggaccaagacaagatgctgagaatgaatgggatagaacctctcttggagagtcggtcacgtttttcagaacatcatttttacagcctctgctaaaatcttgcaaggaggagatagaaaattcttacaatgcaaagctgcagcagtccaagaatgccctcagttggtaatgttttctaaccagtatcatctaagaatccggtcatcttttgatgtataattatatgaatttgtattatgttccatgtatgcttttatgctattcaaaacatgatacgataatatatttaattaatgccaggagtcatgtttc

SEQ ID NO: 15226 - DNA, 304 bp, Gossypium hirsutum
  Clone ID: LIB3829-022-Q6-K6-E8
cggctatagaagctgggtctttttaactcctgatctctagctaggtttgttgtacagaaagtagtcagatccgatctctttgatgttgtggagccgattgaaggttctaattggttatttgtagcgtggttcataatcatttgcatttagagcaaatagcattagtttcttctttgattcatttttcttagatgtttggagaatatcatgtattgtgttggttgttactactttcggagtcggccctcattgaaaatgcttttgttaggtttgagcagttgctcgtttctttttatgccagaaa

SEQ ID NO: 15227 - DNA, 424 bp, Gossypium hirsutum
  unsure (1)..(424): unsure at all n locations; Clone ID: LIB3829-022-Q6-K6-F10
tgcctcgttgaggtcctacagcgatgagcttaaagcaaaagaaccccaatccgataggaagaggaagaaagtacctagnaaaagaggacaagggtatttactgtatggtgaatatccctgatctttgaggggggggggctcttaataggagattttatgcataaccaactcttacctgaaagtactgaactatacttatgtcattacacactaaaagcttgtaaaaacttatgtttaatggtaattcaagttgtaataaaaaaaaaaaaaaaaaaaaaaaaaaaaaaaaaaaaaaaaaaaaaaaaaaaaaaaaaaaaataaaacaaaaaaaaaaaaaaaaaaaaaaaaaaaaaaacaaaaaacaaaaaaaaaaaaaaaaaaaaaaaaggggcggccctttttaaggaccccaaactttcttccc

SEQ ID NO: 15228 - DNA, 564 bp, Gossypium hirsutum
  unsure (1)..(564): unsure at all n locations; Clone ID: LIB3829-022-Q6-K6-F11
cgttttctggnatttcccctttttccctggggggggagacgcaacctaacctaaccaacgattcatccactcctgccccggttcggctttacagctgaacttccaaggccaaaagtgtcaccgatgggtacacatgttatatcaagacaaaaaccggctccttcggggggggggaagaaaaggggaaggggaagaccgaggactcggtttccttagaaaccacaatcggttagtttcaatcctggaattagtttgtctgaacaataaagatgttaacatggaataagtagaaaaatgtgcttttgaggtttgatgctagcagaagaaaagcttagccaaatggaagaggcgaatgagtcgaattccggcattgtttaacatgcagagttgaaagctggcaacatgagaatccgggctgtttgatgttggaaccggtgacaatcgttatcttccaaatggagttgtgcttggtgaggttatattctcggtttagtaagggtgtgatttagaggggatagctagtagctttaagcatttgtatttagctagtagctttaagcattt

SEQ ID NO: 15229 - DNA, 546 bp, Gossypium hirsutum
  unsure (1)..(546): unsure at all n locations; Clone ID: LIB3829-022-Q6-K6-F12
tacaantttcggtcagnaccatttaaaacaaataatctcagggtttcaaagttttcattcccactgcacnnttcttgcttcttgtattatgtgatnntgattagaccactaaatgtgtcttnngcttcttttgttgcttgaaagaggggggggcgcttcttttgtcatcttatccaggaacgggtttcctttcattttgtaacctaggttgtaattttattgcagttatgttgtcacctactatttgggcgcttttatttctcccaatctgcttctgaaactttgttgtagaacgaggagcttggtttacttgtgttcttattctttctgtttgagggttttgtgtttgtcatttgataaaactagtatgttaccacccatttgccaaaccagaattccaatttatctctggaaatctgacctggctgaagcgggctattgagtctggcttaatagagcctcctatctagccaaatactgaactgaaaaaagagaacctttttgttttaggatttcccattataagaattagttaagaggatatta

SEQ ID NO: 15230 - DNA, 524 bp, Gossypium hirsutum
  unsure (1)..(524): unsure at all n locations; Clone ID: LIB3829-022-Q6-K6-F7
gcagtttggcaaaatctacaatggaacacaaaaaactgtgttcttcccaatgtttcaaaaacccanaatcccaaacatgttccttttgtttcattcaaatcaaatctcaatggtaagacaagttcttggggtttggttgtgaagagacgaggggaaatttggttcaataaaggttcggtctttgaaggtttctgcttcaacagcaacagctgagaaaccatctagagcttcagagattgtgcttcaaccaattaatgaaatttcgggtactgttaagttacctgggtctaaatcattgtctaatcggatcctgctcttagctgctttatctgagggaactactgtggttgaaaatttgttgaacagtgatgatgttcatcacatgcttgttgctttgggtaaacttggtctgtatgtgaaacatgacagtgaaaagaaacaagccattgttgaaggttgtggtggtcagtttccagtcggaaaaggtgaaggtcaagaaatcgagcttttccttgggaatgctg

SEQ ID NO: 15231 - DNA, 571 bp, Gossypium hirsutum
  unsure (1)..(571): unsure at all n locations; Clone ID: LIB3829-022-Q6-K6-F8
gnaaccccaaaagtccattattacaatgattataaagcaaagtgcatatgaaccacactgttactaaaacaaaccctaaaacccccaaacacacactagtgttgtaataaccaaacaatgttgtccatcagctgcattgtcttgttcttcctcctctcctcattttttcccttcactatatccacattcaacctcaccgttcctatcccacatcccaatcccaacgaagttgctcaagaagttcaaaggagagtaaatgcttcgatttcaagaagggaaaccttacaaacaacccaaaaagatatatccagttgtttaacaggtaaccccattgatgattgttggaaatgtgaccctgattggcctaacaatcgacaacggttagccgattgtgccatcggtttcggtcaatacgctaagggaggcaaaggtggtgagtattacatcgtgacggattcgtccgatgacgatgccgtgacaccaaggccaggaacacttaggtatgcagtgatacaagaagagccattgtggattgtgttccctagtaatatgcacattaagctcaaacaag

SEQ ID NO: 15232 - DNA, 578 bp, Gossypium hirsutum
  unsure (1)..(578): unsure at all n locations; Clone ID: LIB3829-022-Q6-K6-F9
tcgnaaacactttgctttctttggngatcgtgattttccgaaagctgaattggccggaactcttaccaaaatacctcaggtacaagtgatcaaagagaatgggaagaggaaaaatagagataaagaggatcgaaaacacaacaaatcgtcaggttaccttttgcaaacgcaggaatggcctgctgaagaaagcttacgaactgtcagtcctgtgtgatgctgaagttgctctcattgtcttctccagtcgaggccgtctgtatgagtactccaacaacaacataagatcaacaatagacaggtacaagaaggcttgctcagatacttctaacacaaacactgttactgaaatcaatgctcagtattatcaacaagaatcagccaagttgagacagcagattcaaatgttacagaattctaacaggcacctaatgggagattccttgagttccttaactgtgaaagagttaaagcaggtagaaaacaggcttgaaagaggaattactaggatcaggtccaagaagcacgaaatgctgctagctgaaatagagtttttgcagaaaagggaaatcgaattg

SEQ ID NO: 15233 - DNA, 565 bp, Gossypium hirsutum
  unsure (1)..(565): unsure at all n locations; Clone ID: LIB3829-022-Q6-K6-G10
gcgtttcggnaaaagnaaccttctgntgtaggttggggaacgaggggggacaggtggtacgtaattggtctggtcctgtaagtgagcggaatggaacccatcagtcattgccacctatcaagtatctgcacttgcatgagtgcgacagcttctctataggaattttttgtatgccaccttcctctgtggtgacctgtgcacaatcatcctggaatgacagtgttgagcaggcttatctatggctcattacacgttaagtcatatgattggcttgacccaacagagcctgaagatccgctacaagcaagagctgcaaaacttgtcaaggatactgagatgacagccccttgtgcaacaacagtactttatcccacaagtggaggcaacatccattgtttcagggcacggactccctgtgctatttttgatattttatcaccaccttactcctcagaacatggacgacactgcacttacttccggaggtccccaagaagggatttacctggtgagattgaaatgaatggagaaacgttctcggaagtgacatggttagaagagtttc

SEQ ID NO: 15234 - DNA, 590 bp, Gossypium hirsutum
  Clone ID: LIB3829-022-Q6-K6-G11
cgttttaaaaaactacgcaatgacctgggggcggggggtgggtgaaaaactgcggtggcatgggaggcggggaagccactatcgatagaagaagtggaagtggcaccaccccaaaagctgaagtccgtattaagattctcttcactgttttatgtcacactgatgtatactactgggggggggggggttacactcctctgtttcctcgtatacttggtcatgaagcctcagggatcgtggagagtgtgggtgagggtgtgaatgatttgaaacctggagatcatgtgctccctatcttcaccggagaatgcaaagaatgtcgccactgtctgtcagaagaaagcaataacatgtgcgaactgcttaggatcaactgcgaccgaggtgttatgcttgctgatgggaaaaccagattttccatcaacggcaagcctatctaccactttgttggaacctcgacctttagccaatatactgtcgtccatgttggccaggttgccaagatcagtccaaccgcccctcttgataaagtctgtcccattagctgtgggatatgtacaggttttggggccactgtgaatgttgctaaa

SEQ ID NO: 15235 - DNA, 587 bp, Gossypium hirsutum
  unsure (1)..(587): unsure at all n locations; Clone ID: LIB3829-022-Q6-K6-G12
gcgttcgcttgnagagtaaaaaccgnaanaaacagggggtggttggggggtgtgaatccaatcaaatcgaagagttgagagtggcaacgaggcggctcacttcttattcgtctgcgtggaggtcgcaccaggccacctccgctatcgcctctcgtcctttcatcgacggcgccgattcttctgaggggggggagagccaattcctcctcctcctcctcttccttttccttctctttcgcttctcaattccttcttcccaccagaggttttgcttctgagtcactcaccccaaaaagtgaccacagtgtgattcctgatgttccagcaacagtggctgccattaagaaccccagttctaaaatagtttatgatgaatacaaccatgaacgttttcctcctggtgaccccagcaagcgggcatttgcctattttgtcctgacaggtggtaggtttgtgtacgcatctgttatccgtctgctcatcctcaagcttgtcctgagcatgtcagccagtaaggatgttcttgcactggcttctctcgaggttgatctctccagcattgaacctggcagcaccgtaactgttaa

SEQ ID NO: 15236 - DNA, 573 bp, Gossypium hirsutum
  Clone ID: LIB3829-022-Q6-K6-G9
ggcctgctttgcacatcttctgtgagctgtgtgccctcattccattagggactcctcattccagaatcctctgtatggttgcatgcaagactcttcagagctgcagaacagagggcaagttgacccaccgaccccaactccaacatttgtcaaggtttataaatcagggtcagtgggacgctcgttagacatctccaggttcagcagttaccatgaactgcgagaggagctggctcagatgtttggaattgaggggaagttggaagaccctttaagatcaggctggcagcttgtatttgtcgacagggagaatgatattcttctccttggagacgacccatgggaggcatttgtgaataatgtttggtacataaagatactttcacctgaggatgtgcagaagatgggcgagcaacgggcagagccttttagccccacaaccccaggtcaaaggatgaatagcaccggcactgacaccggcactggtaaactctcatctgttggttcccttgaatactaaactcccaacggcctctgccatggcactcaacttgagagtaatagtaagtatta

SEQ ID NO: 15237 - DNA, 541 bp, Gossypium hirsutum
  unsure (1)..(541): unsure at all n locations; Clone ID: LIB3829-022-Q6-K6-H10
tttttgtgttggggggggaaagaaaaacaccttaagaatttttattagtgttaaaaaggattttacagttcttttacatgattgatacactttgttgcctattgatttgcatatgatcacttctacaatgatgccttctttatgaacaaggtgtggaggtgcaaaacctaccattaaaccacctacacaaaccataagctccaaaagggtaaagggtaagagaagggaaaaaccaaaacaaaaagaagagtaaaaccccatcaaatcctatttctaaatttagtactgctttgcctggtttaactgtcaacttacaggacccttttttctcatccttgacgattatcggttgttgtaacgacggtaatggtctttttcgcaaggtgacggcatctgtgtggtaggataacttaaaagggtatcatatggtaagcatttatcaatccctcaagcatcgaaaaattcgttattgccaaggcaatgtaaaggaaaaaaaanaagtgatatgtcattttgatgttgatgaagtagatactctatc

SEQ ID NO: 15238 - DNA, 579 bp, Gossypium hirsutum
  unsure (1)..(579): unsure at all n locations; Clone ID: LIB3829-022-Q6-K6-H11
gctnctgttttgtttttggtccttgctcaaagggggcgggagatggagagcgtattggtgatttgaagtctgctgctaaggttgctctaaggcgggttgaacttgtctattacaagcctcaagaggtttatgatgctatgaggaaactggctgagctatcggaagatggagaaacagatggcggggggactaaagtggaggaaacacggggtacatctgcgtttgttgttactcctgagctcgtgtcccggaagcccacattccccgagaatagtagagcattgatggatatcctagtgactctcatatacaaaagtggagatgagaggaccaaagcccgtgcaatgctttgtgatatttatcatcatgccctttttgatgagttttcaatagctcgtgatttgctgctgatgagtcatttacaggataatattcagcatatggatgtttcaacacagatactttttaaccgggcaatggctcaggttggcctctgtgccttccgtgttggactaattgctgaaggacatggctgcctttctgaactgtattctggtgggagggtgaaggaattgcttg

SEQ ID NO: 15239 - DNA, 585 bp, Gossypium hirsutum
  unsure (1)..(585): unsure at all n locations; Clone ID: LIB3829-022-Q6-K6-H12
tctgttngatgctcaccagcaggaggtagctgatgtttatgttngaagatggcattattgttgctgttaagcctaatataaaggttgatgaggatgtcaccttgcttgatgccactgggaaaatatgtcatgccaggaggaattgatcctcacacacacctggctatggagttcatgggtactgagactattgatgacttctttagcggtcaggcagcagcattagcaggtggaacaacaatgcatattgactttgttatacctgttaatggtagcttggtagcaggatttgaagcctataaaaagaaagcaatgaagtcttgtatgaattatggtttccatatggcaatcacaaaatgggatgaatcagtttcaagggaaatggaaataatggttaaggagaaaggtattaactcttttaaatttttcatggcatacaaggggtctcttatgatcagtgatgagcttctactgcaaggattagagagatgtaagtctctcggtgccctggctatggtccatgctgaaaatggagatgctgtgtttgaaggacagaaaagatgattgatcttggtattactggtc

SEQ ID NO: 15240 - DNA, 571 bp, Gossypium hirsutum
  unsure (1)..(571): unsure at all n locations; Clone ID: LIB3829-022-Q6-K6-H7
gcgttcgaaagctcaattgntgggacgataccctacaaacggaaaaggntatgttagatgtcctgttgagttatgagagtaatgataaagaaaatggtttggaccgtttaccaaaatctatcgtcaaaggaatgctttctgaaatgtttattgcaggaactgagacaacctcaagcactgtggagtggggcatggcagaaatcctaaggaaacccagtgtactcaagaaactgctactggaactggatcaagttgtagggaaggacagatttgtggtggaaagcgatatcccgaagttggcataccttcaggcagttgtgaaagaagttttcagactgcaccccggcgttccgctcatcatccctcgtcgcaccaacgaggcatgcgaggtagctggctaccatatccccaagcactgcatcgtttacgtgaacgtttggggaatggcaagggatcctaatgtgtgggaagatccactggagttcaagccggagaggttcatagggtcaagcgtggatgtgaagggccaagactttaacctcttgccgtttgggacggggagaaggtcgtg

SEQ ID NO: 15241 - DNA, 575 bp, Gossypium hirsutum
  unsure (1)..(575): unsure at all n locations; Clone ID: LIB3829-022-Q6-K6-H8
tcgcggncgcgtgggnagnaaaaagcttttgcaagtcaaaattatcgaacatattaattgtgcctaaacttgtcgacgttattctgccacatgtcacttttctttctacatttaaatttcaggaacgcaaagatggacgggagaacatgcgctcactacgagatgatgtaaagaatagattgactgacaaacgtgtaaacgaatccggtgatagtagtgggtatgaaagtggtgcccaaactaatagatcattatggagataacatgtgaaggatttgaccgatatcttcgtaaaatagacacgtgaaagacattgtgaatccgatcaagttctagtggtagtgccaatcggtacgcaacaagttcaattttcttagtgatctcatatggcccaataaaccgtggagtcaatttgcctttacggccgaaccgaagaactttcttccaatgtgaaactttcaagaatgcattgtcacccacttgaaattctatttcttttcttttaagattattnaggattttctgtnnatcaaaagctgcttttaatcnacagaaatcctatataaatcttaaaa

SEQ ID NO: 15242 - DNA, 583 bp, Gossypium hirsutum
  unsure (1)..(583): unsure at all n locations; Clone ID: LIB3829-022-Q6-K6-H9
gcgttctcggncgcgtgggtggacgcgtgggggattaaggagtatataagcttgattttcccaataaaccacttacagggccacctaaaatggaaacatctgttattaatgggacttataggggatttatggaagtcattctacagaacaatgacactaagatgcatacttatcacatgagtggatatgcatttttcgttgtcggaatggattacggtgagtggtcggagaatagcaggggcacatataataagtgggacgggattgcccgctccacaacacaggtttatcctggtgcatggactgcaatcttgatatcacttgacaacgtcggagtctggaaccttagaactgaaaacctcgactcatggtatcttggtcaagaaacatatgtcagggttgtcaatcccgaggctacaaacaaaactgagttgcctatgcccgataatgccctcttttgcggtgccctaagcaaattacaaaagccgcaggatgtatcatcgtcattggcaacatcaatcatagagggtagatcaaaactgttctttacggtgctgatgattgcctcgacccttttcctcat

SEQ ID NO: 15243 - DNA, 548 bp, Gossypium hirsutum
  unsure (1)..(548): unsure at all n locations; Clone ID: LIB3829-023-Q6-K6-A10
ctccggtgggnatacagggtggnaatatccaatgggggagattatcaacatgagagtagctttcaagccaacacctgctattagtaggaagcagcacacagtgactcgtngagaaaaaagagatagaactactagtccacggtcgtcatgatccttgtgttgcccctcgagcggtgcctgttgttgaggccatggtagccttggtgcttgtggaccaattaatggcacaatatgcacaatgtaacctttttcctatcaatgcggagttacaagaaccgttgagcttaggtttccccaacttcgaaccagcaatgatttgaatggttgcagaatgttctggttttaaggttttatcaaccctaagtcgaagggcttattagcatttctgttttgccctactttgttgtttgtgtgttttctttgtaactgttcggagcttttattgcttctcatgttccaacagtagagaataacagtttcagtgtagttgaaattattgagttgacatgtttttaataatatggcttatgatttaatcttcttgagtt

SEQ ID NO: 15244 - DNA, 516 bp, Gossypium hirsutum
  unsure (1)..(516): unsure at all n locations; Clone ID: LIB3829-023-Q6-K6-A11
ggggggggggttataacaaaaactcctttctcccttctcttaannatanaatgattattgnaaggttacgccaatggttaagtctactggtctgtgtgcttgctgttatactactcaattttttaagcgctagtntanggattacttgggtgggggatgccnnancgaaaggagctntttgtttggatgggagtccaccagcttaccattttgacaagggctctggcgctggacttgataattggattgttcacatggagggtggaggatggtgtgaagatgtgccgacttgcctctctcgtaagaacaccgatttagggtcatcaaagcaaatggtgaaccaatttggcttctctggactcttgagcggccagcaaaaatccaatccacatttctacaattggaatcgaattaaggttaggtactgcgatggatcatccctcacccctcatgctgcccatcgacctaataatctctttttcaaacgaaacagcatatccgaatttatcattgctg

SEQ ID NO: 15245 - DNA, 583 bp, Gossypium hirsutum
  Clone ID: LIB3829-023-Q6-K6-A12
agggctggcttgaatgaagaacgcgatgcgccaaccctccacttttactctgcttattgctaatttgcgccaccgtcgcctcccgccctcccctcgcccacgccggtgccggttacagtaagatcgacgagatctcctgtcctagtcgccggcgaatcatgtccaaatctcgcgtttatactgacgtcaacgttcttcgtcccaaggagtactgggattacgagtctctcgctgttcaatggggtgatcaagatgattatgaggttgttcgaaaagttggaaggggaaaatacagtgaggttttcgagggcataaatgtcaacaacaatgagcgttgtataataaagatcctcaagcctgtcaagaaaaagaagattaagagggagattaaaatccttcagaatctatgtggtggcccgaatattgttaaacttcttgatgttgtaagagatcagcactcaaaaacaccaagcttgatatttgagtatgtcaacagtacagatttcaaggttctctacccaactttgactgactatgacattcgctactatatatatgaacttctcaaggccttagattactg

SEQ ID NO: 15246 - DNA, 351 bp, Gossypium hirsutum
  Clone ID: LIB3829-023-Q6-K6-A7
tgttgtgagtttcagcttttgctgcttaagtaatttggtgggtgatggattccttgctgacaacttatgttctgaggaagaggtgaaatatttgataacatggacatgtaaccagtaacatgtacatcctgcttgtatgtgtactgtagaaacccttagatatagtgtgtagttatgtaattgcaatgttgctcacattgcgctagctgagtagattagctcttctatgttgctgtgtacatgtagtaggtagttatgccatatgcaaatggaaaattgatatttgatgtctgtaagatcgtgtggagtttgaatttaggtttatgaaggtgttgaaggcattataactta

SEQ ID NO: 15247 - DNA, 159 bp, Gossypium hirsutum
  unsure (1)..(159): unsure at all n locations; Clone ID: LIB3829-023-Q6-K6-A8
cttccaatcctccccaccatagcgcagtgggatgctttaccctacaaaccttggnagctcaggcaggagttcgtcagtgatattcaaggcgtaacaagtatctgctggaggatgatctacatctcaaagccattcaagggaggccaaattaagcaagga

SEQ ID NO: 15248 - DNA, 592 bp, Gossypium hirsutum
  unsure (1)..(592): unsure at all n locations; Clone ID: LIB3829-023-Q6-K6-A9
gcgttcgggcctcattcgattcgaatcaaaccagaggagcggttgcagatgtaaagaagaacatagaaactgttcaaggggcagatgtgtantcctgctgcacaaacaaatgnncttatctttaaggggaaaagttcttaaagatgacacgacactggctgtaaaacagtgtcactngaaaatagctttattgtgatcatgttgacaaagaataagggtgcatctggtgagtgctcaactgcttcaacggctcctacaaagaaagctcctgaggcaagtagtctgccaacagctacagtaccagcttcgactgcacctgttgtgacgtctgcggcggctgcacctcctgctgaatctgctcctgttgcttcaagtactcctctgtcagattctgatgtttatggtcaagcagcatctaatttggttgcagggagtaacttagagggaacaatccaacaaattcttgacattggtggagggacctgggacagggacactgttgtccgcgcccttcgcgctgcttataataacccagagagagctgttgaatatttgtattctggcatccctgagcaagctgaagctccacctg

SEQ ID NO: 15249 - DNA, 542 bp, Gossypium hirsutum
  unsure (1)..(542): unsure at all n locations; Clone ID: LIB3829-023-Q6-K6-B10
ggcgagnacagtagcaggagaaccggggttccgggggtctcatgcgctgcttctgagtttgtggagttgttcgttggagtaggtgcatccagagtaagggacttattcgataaggccaaatccaaggctccttgcatcgtcttcattgatgagattgatgctgttgggagacagagaggagctggtcttggaggaggaaatgatgagagagagcagacaatcaatcagttgttgactgagatggatggattttcagggaattctggtgtcattgttttggcagcaaccaacagaccggatgttcttgatgccgctttgttgcggccgggtaggtttgaccggcaggttacagttgataggcctgatgttgctgggagagtgaagattctccaggtgcactccagaggaaaggcacttgcaaaggatgttgattttgaaaagatctctaggaggaccccaggtttcaccggagctgatttgcagaacctgatgaatgaagctgccattcttgcggccaggcgcgacctcaagnagatcagcaa

SEQ ID NO: 15250 - DNA, 373 bp, Gossypium hirsutum
  unsure (1)..(373): unsure at all n locations; Clone ID: LIB3829-023-Q6-K6-B11
tcggncgcgtgggcggccgcgtgggcggacgcgtgggcggacgcgtgggttcacattcagcgtccggccagaggcaaaggccacaaagaatggatttaagatccgaatgtagttcctgcaacagaggaagaagcacggcgtattctagaacgcatggatgctgagatgccacagcaaagccagtgaagctggggcagatcaacaccatcttctagcataagcaatttgatggtatcagtcaaatgttaaagattctttgtaacattagaaacataaattattgcagcctgttaaattttgcaggcatgaacctgatgaatgtatcattccccttgaaataaatcagcacactgcctccttttgtttccccaag

SEQ ID NO: 15251 - DNA, 565 bp, Gossypium hirsutum
  unsure (1)..(565): unsure at all n locations; Clone ID: LIB3829-023-Q6-K6-B12
gttcattgttggctgctcagctaaggggattagggggggggaatcctcgtctgatagcgagaaaagttgagaagaagagaagtaagaaaactctgtttagttctgactcttttttcccaccgttctgttatgtgngaaaagttgtctgggttttctttgatcttgttttaggattggcggcgtgttttcagatctgtggtgggttctgagactaaaactacgtcggtttgattagattcatctctgaaattgaggtcttcatttttggaagccactggcacataatcagcgacagtattataatcagaaatcttcccaaccggcattgcaattgaactgactccagaaatgtcgttccgtagcatagttcgtgatgtgagggatagttttgggagcttatctaggcggagttttgatgttagattggtggggcatcatagaggaaaatctcatggtgctttacatgatctgcatgatgagccgcttgtaattcagaacggccgttgggctaatctccctcccgagctgcttactgatgtgatcaagaggttggaagagagtgaga

SEQ ID NO: 15252 - DNA, 539 bp, Gossypium hirsutum
  Clone ID: LIB3829-023-Q6-K6-B7
ttcgttaagcatctaaccggcaagacgatcactctcgaggtcgagaactccgatacgatcgacaacgtgaaggccaaaatccaagataaggaaggcatccctccagaccagcagcgtctgatcttcgccggaaaacagctcgaagacggccggaccttggccgattacaacatccaaaaggagtcaactctccacctcgtcctccgtctgcgcggtgggatgcaaatcttcgtgaaaaccttgactggcaagacaatcactctcgaggtcgagagctccgacacgatcgacaacgttaaagcgaagatccaagacaaggaaggcatccccccagaccagcaacgtctcatctttgccggaaaacaactcgaagacggccgtaccttggccgactacaacatccagaaggagtcaactctccaccttgtccttcgtttgcgcggcgggatgcaaatcttcgttaagacgcttaccggaaagacgatcactctcgaggtcgagagctctgacacgatcgacaacgtgaaagccaaaatcca

SEQ ID NO: 15253 - DNA, 579 bp, Gossypium hirsutum
  unsure (1)..(579): unsure at all n locations; Clone ID: LIB3829-023-Q6-K6-B8
ttaaacccacctgggngaatcgttaagcctgatcaattcaaagcaataaacgatgaaggaatgccgatttatcagaggccatttatgagaggtaaactgtacattcagttcactgttgacttccctgactcgttgaccccggaccagtgcaaggcactagaggctgtgcttcctcccaggcatcggttcagctgactgacatggagctggatgagtgcgaggaaacaaccctgcatgatgttaacattgaggaagtgatgcgtaggaaacagactcaagctcaacaagaagcttatgatgaagatgaggacatgcatggtggtgcgcagagagtacaatgcgctcagcaatgataaaaaaaagccgaatgtccgagacacagacggtggtttttggcgatggaatgtactgtggttaaaaaaaaaaagaaagaacatttgagagtaagattctcaaaacattgttgtgttttggtagtcctttattttttgtttttaatagtgcaagtattttagtaattgaaatggtgttatatgctttgaaacctgatgctttctaagtatgcaaagatttatgcac

SEQ ID NO: 15254 - DNA, 569 bp, Gossypium hirsutum
  Clone ID: LIB3829-023-Q6-K6-B9
cggccgcgtgggcttttttgagaaacggtagcgaaaatgtcgtcgtcggggaggaagatcacccttaagagctcagacggcgaatcattcgaggttgatgaagcggtggcgttggagtcgcagacgattaagcatatgatcgaggacgattgcgctgataacgggataccgttgcctaatgttacgagcaagatcttagcgaaggtgatcgagtactgcaagaaacacgtcgaggctcctaagacagacgatcgatccgccgatgacgagctcaagagttgggacgctgactttgtcaaggtcgatcaagctactctctttgatctcattctggcagcgaactatttgaacatcaagggcttgctggatctcacttgccaaactgttgctgacatgatcaagggaaagaccccagaagagatcaggaagactttcaatatcaagaatgacttcaccccggaagaggaagaagaggttcgtcgggagaaccagtgggcattcgaatgaagggtcaatttcgagtgccggttcaattgtatcaaactcatctatatataaaaatgtagttt

SEQ ID NO: 15255 - DNA, 576 bp, Gossypium hirsutum
  unsure (1)..(576): unsure at all n locations; Clone ID: LIB3829-023-Q6-K6-C11
gnccaacagttcacgaaaacgtgggtgagcggggggggctcttgacctcaacaacgacggtgtcctctccaggtccgagcttcgcaaggccttcgagtctctgcgtctcctggagtcccacttcggtgtcgacgtcgccactccccccgacgagctcactcagctttacaactgcgggggggagaggtttgattgcgatggcagcggcaccgttgacctccaggagttcagatctgagatgaagaagattctgcttgctattgctgatggattgggatcttgccctatccagatggttcttgaggatgatgaccaaagttttctgaagaaagctgctgatcttgaggctgctaagctcgatccaaaccatgctcaagcctcctgaatgatgctcccaggttgctgaacttgaatttatgcttttgtattttcttatcttttgcagctactttagcttgttggtatttggatccatccaagtatatatgaataaaagggttaacgctacgtttagccctcgagctttaggcgaatgtgaaatgcgtacttaaacttgaatttcatgatacatttcat

SEQ ID NO: 15256 - DNA, 582 bp, Gossypium hirsutum
  unsure (1)..(582): unsure at all n locations; Clone ID: LIB3829-023-Q6-K6-C12
acccgtttttaaaccgggggggaagtngggccgccaaaccgggtctttccttatggtcaatgcttatcctttctttgcttatgagtcaaacacggacgtcatctccttagactacgctttgtttagggagaacccggttgtggtggatgcgggtaacgggttgaggggggggggtcttttcgatgctcaaatcgatgccgttttcgcggcaatgtctgctttgaaatatgatgatattcgattggttgtgacggaaacgggttggccctccaaggggatgagaatgagatcggtgctagtgtcgaaaacgccgccgcttataacgggaatctggtccgtcggatcttgaccggcggtgggacccctttgagacccaaagcagatctcaccgtttatctgtttgccctttttaatgaaaacaacaaagtcgggcctacatccgaacgaaattacggcctcttttacccgaccgaggaaaaagtttacgatatccctttcactgtagaagggttgaagaattaccatgacaggcggtcgccggtggccgggaatcaacccgtcaacagaggaaaaggggtgtgt

SEQ ID NO: 15257 - DNA, 252 bp, Gossypium hirsutum
  unsure (1)..(252): unsure at all n locations; Clone ID: LIB3829-023-Q6-K6-C7
ccgggtcgnnacccacgcgtccgcccacgccgtccgnaaaaaaaaaaaaaaaaaaaaaaaaaaaaaaaaagaaaaaaaaaaaataaaaggtaaaaaacgttacgaacggaatgaaagggtacgaaatagttctatgtatagggatacactaaatttaattgggtggcccgtttttaatggattgatttttagtgggccaaacctttgcgactggcgaagttgggtgtaattgctgacctatactccattttg

SEQ ID NO: 15258 - DNA, 589 bp, Gossypium hirsutum
  unsure (1)..(589): unsure at all n locations; Clone ID: LIB3829-023-Q6-K6-C8
gcggcgttggccagtggaatccacgttccaagcagaggatttcatggagggttccatatccaggtctgggaataattctttggggttgaatgttgcaggcccttccagttccaaagtacaacgtngaacccggaaaaaaagaaccgaggacgacggcggagaaggtggaggtggtttggaccttaagctttctttatctttgtagtggtctgtcttggtgtttctgtatgtaaatttgtggctctgcttggttcaagttttagaggcaagcctctggctgcgggaattgaaagcagggccatggtggtggtaatagggtaacttaaacaagtaaaataagcatttgaatgtgcaattctttttcactatgattttaaaaatggggttacgttttcaggcctaaagagccaatcggccgaactgtaacttggggttgaatttcacattctatcacatatgtacaggctgatagactcaaatatgtagttttgtattaattgggtgcttcaagtttgttttcagcctattaactcaggtatttcgagacctaatttcatggtttccgatttaccaaattactagtttgcag

SEQ ID NO: 15259 - DNA, 584 bp, Gossypium hirsutum
  unsure (1)..(584): unsure at all n locations; Clone ID: LIB3829-023-Q6-K6-C9
cacatcaggggcggatatgcagagtttcttcacgcaccaaagagaggttcactgatttcgctgctgttcgtaggagattcagagaacagatcgataactgggaagacaaagcaaatctctaatattccaattcacttgagcatatattctccaaatgttgtcaacttgacacttatagatcttcctgggttgacaaaggttgctgtagaaggacagtcagatagtatagttgaagatattgaaaatatggtccgttcttatgttgaaaagcctaattgcatcatattggctattactcctgctaatcaagacattgctacttcagatgccataaaacttgcaagagaagtggatccatcaggtgaaagaacttttggggtgctaacaaaacttgatctgatggataagggaacaaatgctacagaagttcttgaaggaagggcatataggctacaacatccttgggttggaattgtgaatcgttctcaagctgacatcaataagaatgttgatatgattgttgctcgtcgaaaagacgtgaatattttgaaacaagccctngatatggacacttggcgagcaaa

SEQ ID NO: 15260 - DNA, 431 bp, Gossypium hirsutum
  unsure (1)..(431): unsure at all n locations; Clone ID: LIB3829-023-Q6-K6-D10
gcgttcgcgtgnactgggctctcattcgttgcgcgaatccgcccgaatgccgaagccagctatgatggacttttcagccacccggacggacattggngaaagtacctacgaacaataagatgccgggtttagatgtgaagccttcaggtaactatttagagatcgatttcttttgatacttgtggttatttttggtttctcggttgaatgaatgtgcaccggtggtgctctttaaagcattttggtcatgcaatgaaagctatagaaaccgttagttccaaaaaaaaaaaaaaaaaaaaaaaaaaaaaaaaaaaaaaaaaaaaaaaaaaaaaaaaaaaaaaaaaaaaaaaaaaaaaaaaaaaaaaaaaaaaaaaaaaaaaaaaaaaaaaaaaaaaaaaaaaaaaaaaaaaaaaaaaaaaaaaaaagggggg

SEQ ID NO: 15261 - DNA, 190 bp, Gossypium hirsutum
  unsure (1)..(190): unsure at all n locations; Clone ID: LIB3829-023-Q6-K6-D11
gcaagtagttcccttggttaatcttatgggagacgtanctgtaataaaaaaanagcaaagtgggatcccttggttaatcttgtggggggtgaaaaagtaccatattctactttgctcttcgcaatgtacagctntgtggcgccattttttttttttttttttcnacccaccccctctcgggggggggggg

SEQ ID NO: 15262 - DNA, 565 bp, Gossypium hirsutum
  unsure (1)..(565): unsure at all n locations; Clone ID: LIB3829-023-Q6-K6-D7
gctctcgatgcctgaccctttcacagcttataatgcaacttatttcattgaagtggatcggttactacgtccaggtggatatttggtcatctctggtccccctgtacagtggcctaagcaagataaagagtgggcagatctccaggctgtggcaagagcattgtgctatgagttgattgctgtggacgggaacacagtcatttggaaaaagcctgatggagattcgtgtctgccgaaccaaaatgaatttgggcttgaatcttgtgatgaatcaaatgaccccagtaatgcatggtactttaagttaagaagatgcgtgacgtcaacgtcttctgtgaatggagaatatcctgttgggattattccgaagtggccagacaggctaacaagagctccttcaagggccttggntcatgaaaaacgggattgatttgtttcgggcagacacaaggaggtggacaaggagagttgcctattataagaatactctgaatctgaagcttgggagtccagcagtacgcaatgtcatggacatgaatgcattttttggaggttttgcagcagc

SEQ ID NO: 15263 - DNA, 575 bp, Gossypium hirsutum
  unsure (1)..(575): unsure at all n locations; Clone ID: LIB3829-023-Q6-K6-D8
gcgtgggcttaacctgagggaggacagagttcagagnagcaacagtctcccccaaattgaagggaaatatgttcaatgagttcctgagcttatctcccagtttcagtttccatggtcagcaaggagtgaaactgcaacctctggtatagctccacagatagtgaaagaaaagagaatgggcaggacatcagaacttctactgtttgtttaaagaatgaatcatcagttgaaactgatgcgatggaattggatgttttccagaagagccttctttcaggagtggctttatgtccattagatcagaacatcaagggggttcataaaccatcattatcagaaactggaaatggtattggagaagctgggaatgaaatggtcaacggggaatcacctgatatgaatgaaagacttcctgcacttccagctgcagcaaattcaatagatgatggagggacaagcacctctagaacccagagcctagatgcagagcatctccttttccatgctgagcagccttcaaattccaatgctactgcttgtccagatggtcctctggagccagatccaagcagcag

SEQ ID NO: 15264 - DNA, 537 bp, Gossypium hirsutum
  Clone ID: LIB3829-023-Q6-K6-D9
gcgagggccgccctttttttttttttttttttttttttctgttaaatattccaggtttatttcaaggagctaatccaacctgtttccacactgttttttcattcccttgcaagggatacatttaattaacacataaatgtgatcatatttggtatctatgtgaattcatgacttgaaaagagaaaatggaaaaaggaagaggagagacaaatgagtaggagctaagaaaaatcagaggagaaatgtaaaggcagagatgaagtaggataagaagtaaatgatgatgacaaggaagatgctcatgatgagctctaagcactgcaatatctcgcagacaattcggtttggtataaatttttccctaccctttattttaaaaaaaaagttctagttttaggagtttcctgttagaggaaaaaggaattgaatgcttcaggcaaaagaactttcactgatgctttcttaatatgattttaactgtctgaacaaaggcatgctctttttcttttttatgatcactagatatttttactattc

SEQ ID NO: 15265 - DNA, 574 bp, Gossypium hirsutum
  Clone ID: LIB3829-023-Q6-K6-E10
ctttcaaatcaatcatgctattggacatctgggggtgtgagtcaagaatgcaaggctgtagtttctgaatcggagagaagatcttgatatgctattagcgaaggatgaaccaaagaaaatctgctcacaaattggtctatgcttatttgatggaactcaaggtgtaagtatgaggattgaaagcattgtgaatgagaatgctggaaaagcctctggcagtttacgcgatgctatgtgttctacctgtgagatggcagttatatggatgcaaaaccagcttaagcagaaccagacacaggaccatataattgactatgtcaatgagctctgtgatcggctgcctagtccaatgggagaatcaagtattgactgtaaaagtctatcttctatgcccagcgtctctttcacaattgctggaaagttatttgagctccgtcctgagcagtatgtcatgaaagtgggcgagggagatggggctcaatgcattagtggattcactgctctggatgtaccacctcctcgcggacctctctggatcctgggtgatgtatttatgggccagttccatacagta

SEQ ID NO: 15266 - DNA, 596 bp, Gossypium hirsutum
  unsure (1)..(596): unsure at all n locations; Clone ID: LIB3829-023-Q6-K6-E12
cgtgggngaaaagttggtaagggggggggagcggggggaaaatggagcagaaagattgctccacgaaagtagacaaactgattgagaagcatgcctggattgctactgaaaggcaactttttggcagaagtgggacagattatgattttgcatcccgtgatcctcataaagcagggggggggcttgacaagcttcaaactgaacaatcaagccttgaaaaaagagtaaataagaaagtgatggcgatgtttgagaaagctgaagatgagtataatgatttgatgtcgaagaaaaacactgtggagaacgacaaatctaaaattaagaagacaattgaagagctagatgagaagaagaaagaaacactaaaggtcacttgggtcaaagttaaccatgattttgggtccatcttttctacgctgttgccgggaactctggcaaagctcgaaccaccagaaggctgcagcttcttagatggtcttgaggtccgtgttgcatttggtggtgtttggaaacagtccttgtctgagttgagtggaggtcaacggtctctacttgcactttcactaatcttggctctgctgctgtttaaacca

SEQ ID NO: 15267 - DNA, 580 bp, Gossypium hirsutum
  unsure (1)..(580): unsure at all n locations; Clone ID: LIB3829-023-Q6-K6-E7
gcgtttgccggntcaaagtgaagaaggagctggaggaaggaaggcggcggtccaaanaagaagccggtttctcgttcggtgaaagccggattacagtttcccgttggtcgaattggacgatacttgaagaagggcgatactctcacgtgtgggaaccggtgctccggtttaccttgctgctgtgcttgaataccttgctgctgaggttcttgagttagctggtaatgctgcaagagacaacaagaagaataggatcattccaaggcatgttctattagcagtgagaaacgatgaagagcttgggaagcttttagctggtgtgactattgctcatggtggtgttttacccaatattaacccagttcttttaccaaagaaaaacgagaaagcggctgcaaaagagcctaagtcgccatctaaggctacaaagtctccaaagaaatcacctaagaaggcttagttgtttgtctattatagggtttgttttgatttatctgttaatgtatgtaggttccttttgtgtactttggttgtaggaaaatgttggtaatgttgtttagaatatgttttgtttgaaatg

SEQ ID NO: 15268 - DNA, 568 bp, Gossypium hirsutum
  unsure (1)..(568): unsure at all n locations; Clone ID: LIB3829-023-Q6-K6-E8
angatgagagaagatgcttgngagcaattcttaggaacgaagtcggatggttcgatgaagaagagcacaattcaagtcttcttgcagccaaattggcagctgatgcagctgacgtaaaatctgcaatagctgagcggatctcagtcatactccaaaacatgacttcacttctcacctccttcatcgtcgccttcattgtagaatggagggtctctcttctcatcctcggtaccttccctcttctagtccttgcaaactttgctcagcaactctctctcaaagggtttgctggtgacactgcgaaagcacatgcgaagactagcatgattgctggcgaaggtgtaagtaatatcagaacagttgcagccttcaacgcacaaaacaagatcctttcgctattttgtcatgagctccgagttccacagatgcaaagccttcgtcgcagccaagtttctggcctcctctttggcctatctcaacttgctctttacgcgtcggaagctctgatactttggtatggtgcgcaccttgtaaacaaaggtgcctccacattctcaaaggtgatcaa

SEQ ID NO: 15269 - DNA, 593 bp, Gossypium hirsutum
  unsure (1)..(593): unsure at all n locations; Clone ID: LIB3829-023-Q6-K6-E9
gtggctttcctatcttcatttcatcgcactctacgacgaaagaaacaganaaaatgaccaagtgttacccaaccgttagcgaggagtaccaaaacgccgttcaaaaggctaagaggaagctaagaggtctcattgctgagaagaactgtgctccactcatgctccgtctagcgtggcactcagctggaacttttgatgtcaagaccaagaccggaggtccattcggaaccatgaagcaacctgctgagctcgctcatgctgctaacaacggtctcgatattgcagtcaggcttctcgagccgatcaaggagcagtttcctatcctttcatacgctgacttctatcagcttgctggtgttgttgctgttgagatcaccggtgggcctgaaattccattccatcctggaagagaggacaagcctcacccaccacctgagggtcgtcttcccaatgctactgagggagctgatcacttgaggcaggtgtttagtaatcaaatgggtcttagcgaccaggacattgttgctctttctggtggccacaccctgggaaggtgccacaaggagaggtctggatttgagggaccatggact

SEQ ID NO: 15270 - DNA, 570 bp, Gossypium hirsutum
  Clone ID: LIB3829-023-Q6-K6-F10
tctgttcaatgtcaaccgagttgacaatggggggaggcggggggtttacctacttgacactcttgacaaggatatcaattccttttccatgagagttagggagtggtactcttggcatttccccgagttggtaaagattgtcaacgataactatctctatgctagggttgctaagcttatggggggaggagtcaaagttgtctgaagaacatgtacctgcgttaactgagatactcggggatgaggacaaagcaaaagaagttgtagaagctggcaaagcatcaatgggacaggatttgacccctgttgatttgattaatgttcagctatttgctcagagggtaatggatcttgctgagtacagaaagaatctttatgattatttagtgactaagatgaatgacattgcaccaaatttggcatcattgatcggggaagttgttggggcccggttgatctctcatgctggtagtctcacgaatttggccaagtgcccctcttctactctccagattcttggagcagagaaggctcttttcagggcactgaaaactcgcggaaatacaccca

SEQ ID NO: 15271 - DNA, 515 bp, Gossypium hirsutum
  unsure (1)..(515): unsure at all n locations; Clone ID: LIB3829-023-Q6-K6-F11
aattgctgtggtgtgtgagnntggggacctcggnagggtgcatgnatnngctgaaaggnagnngaaggcaaggnagnaatgnagnnattgcnncaattgnnttagggnagggacttattcttttgttgtattngnnttttannaaaaacagnaagaaagcgtgtgcggggtggagtttgtacccaaagttnngaagccccatcggtgagggccttctttagcatggtcacttgtnncaaagtaaaaggggacgaagtgctgtgcatttgaagcctctnnggtctgcaagattcaaatgtcatatacnnttgaggacnnggtggaagtattattataacnnacaactctgnannacttgtctgagctgtatcaacncnnggtgttaacccagttactacanntcctnnccaaatnnaatccaagnaaagaataaagnnggtcannggttgtntnnatgtatttcncnngtaaatgngnnggtcgtgnnnttgggaaanttgaaaaannnattggca

SEQ ID NO: 15272 - DNA, 458 bp, Gossypium hirsutum
  unsure (1)..(458): unsure at all n locations; Clone ID: LIB3829-023-Q6-K6-F12
ttaagatcttttcccatagataaagccgcagtgcagaaaaaaatcaatgataaaagcggagattttgtgagatttggagatttgatgaagagaatttttttttttttgtgcatgnaagccnatttttttggggggggtggcggcaccgctgcagttttgagataggtcaatggagatggaagggaagcgaaagaaggagatagatgggaaggcttgggagacggaattgatgtaagagatgatggttggggtgtcccaaaagccagtggtaaggaggatggtgatggagtatcggttgttgtagtggtgaaagattattttgccaagctccaccattgagaacacatggcccaatcccggcgatgggtagagaacgatcgtctcttgcattgtttattttctctctctttttcttgaacgactgtgtttctcgaacattgatggcaccactaaatttc

SEQ ID NO: 15273 - DNA, 566 bp, Gossypium hirsutum
  Clone ID: LIB3829-023-Q6-K6-F7
tcatgccttaatacagcaagtagctgtgggcagattgcctgaacttaatgtatttggtcatgattatccaactaaggacggcagtgcggttcgagattacatccatgttatggacttagctgatggtcatattgctgcagttaggaagcttttttcctctgagaatataggctgtgttggctataacctcggaaccggcagtggtacatctgtgcttgaaatggttgccgcttttgagaaagcttctggaaagaaaatccccattaaactatgccccagaaggccaggagatgctacagctgtttatgcttccactgaaaaagctcagaaagaacttggttggaaagcaaaatatggtatagcagagatgtgcaaagatcaatggaagtgggcaagcaacaatccatggggataccagtcaaagccttaggcttcaactaaatactaattttcttccccggtcttttaaaaatgtctcatagggagaattaagtgtacaaatacttgtttaatttaaacaaaactgatccttgatgatcaaaagttaggatttatcaaatgttcaa

SEQ ID NO: 15274 - DNA, 474 bp, Gossypium hirsutum
  unsure (1)..(474): unsure at all n locations; Clone ID: LIB3829-023-Q6-K6-F8
ccgggtttcgacccacgcgttcgctttttattatgttctnntttagggcttctggcaaacccttgagcgccgtcggtcagccttatacgcacggcctccgtcgatgcccgggctccaatcgcgacggagagggcaccaactcggcgatttcagcgaaaggtatgaaggttgctgaggggtgccgcgcatgtggaggcgcaactgtgggggaggaggcctctagctccgagttgtgcgccgatcgggactgctggaggcggcggctactgctagggtttctcaacccttccattttccattagtttcgggcctggattgggaattagctattgggcccgtttattgggcttgtattttttctttgggtttattcgttaataggccaggccaaaattggtattacacataatatgtttgtattatattgttttacttgtagtttgaattgttatgtaattattgttttttggcatc

SEQ ID NO: 15275 - DNA, 585 bp, Gossypium hirsutum
  Clone ID: LIB3829-023-Q6-K6-F9
aaagttcgaaactctctcagcttcttattctctttctacaatcgttgccatttgaatttccatttagctcgccggcattttgttttaattcaattgtagttacaattacacagtgatttgaatcgcaagagtcgctagagctctctgcaatggaatctgcacagcagcaaagaagagggggaggaggattggtatcgctatctccatcgcaaacgccacgttcaaacgataaatcggtgcgagatctgcgatcagccgattccaattcgagttccaaacaagataaaggcgttaacgttcaggttattttacgttgcaggccattgagtgaagatgaaacgagaatacatactccggtggtgatatcgtgtaatgaaagtagaagagaagtttgtgctgtacagaatattgctaataagcaaattgataggacctttctttttgacaaggtctttggtccgtcgtctcagcaaaaggagttatttgatctagctgtgtctcccattgtgaatgaagttcttgagggttataattgcactatctttgcatatggccagacgggaactggaaagacatacacaatgg

SEQ ID NO: 15276 - DNA, 588 bp, Gossypium hirsutum
  unsure (1)..(588): unsure at all n locations; Clone ID: LIB3829-023-Q6-K6-G11
tctttcctttttgtcccttgtttatttggtgggggggncgcggggccgacgctgatgtcatagttccggtgcttcgtcggagggctcgcatgggccaccgacgaccgggccctcgaagaagccttcagtgcgtttggtgaaatcgtcgaattgaagatcattaatgatcgtgagactgggggggggggaggctttggattcgttactttccgtgacgagaaagctatgagggacgcgatcgaaggaatgaacggtcaaaatcttgatggaaggaacatcaccgtcaacgaagcccaatcgcgcagaagtggaggcggtggcggaggatttggaggaggaaacggtggttacagccgcggtggaggcggcggcggatatggtggtcgccaaggaggatatggtggcggacgccgtgaaggtggatacggaaatggtggagggtatggtggtggtgggtacggaggtggacgccgtgaaggaggatatggtgacggcggatctcgttactcaaaaggcggcggtgcatctgaaggcagctggaggtcttaagtttaggtttcaaagtgggcttgggcctatattgttatg

SEQ ID NO: 15277 - DNA, 584 bp, Gossypium hirsutum
  Clone ID: LIB3829-023-Q6-K6-G12
tttttctatttctatcatttatttgcgggggggggggttggctgaaaaaaaaaaaacatagattcggatcgtaagaggaagaaatcttcgatctcatccgcagatcgaacggcggcgaaggagggcgaaaaacataaagataaagctcccactttcttcaccaatcaccaccaccaccacgcggggggggggggagaagagcaagatgtcttcttcatcgcccgccaatcaagtgagggcttctcacatcctcatcaagcaccaaggctcccgccgtaaggcctcttggaaggatcctgaaggtcgcgtaatctccaacactacccgagatgccgccgtctcacagctcaaagccctccgtgacgacatcacttctggcaacgctaagttcggtgaggttgcctctcgccactccgattgcagctccgctaaacgcggcggggaccttggtccttttggtcgaggccagatgcaaaagccatttgaggatgcaacatatagccttaatattggtgagataagtgacatcgtggatactgatagcggagttcacatcattatgagaacaggttgattattggtga

SEQ ID NO: 15278 - DNA, 575 bp, Gossypium hirsutum
  unsure (1)..(575): unsure at all n locations; Clone ID: LIB3829-023-Q6-K6-G7
ccttcaancaacaacaacggtggagggcgcgggagagtccacgcacttacggcaggcggtgngagaccggcggattctggttgngatttggcggaaacctnnccttctaaaactgatttctccgtcactgccattgccggtaacgctttcttcgctaccgttttttacaccggtactaggtgagaaagaggggggatgaaaaactgatccatcgttgaatgctaaagaaaaattaaaataaaatctcagaaaaccctagtaaggacacgtagtgagagtagttgattaaataggaaaaaaataaaatcaaatcgtaatagatgaaagctcttagacgaagtcagacttcgtcttcatcttcgaactcgccttcatcgtcatcttcttcgtcgtcttcgtcatcgtcgtggacttatttacgttcggttcttttcgttgttacttcttcttcaccggctgcctgttcttccgctgatagtggtagactcaaatcaccttggtctcgccggagaaagaaacatgccctttcacctcagcagtggagaagtttgtttacccccgatggtagactccgg

SEQ ID NO: 15279 - DNA, 590 bp, Gossypium hirsutum
  Clone ID: LIB3829-023-Q6-K6-G8
gcgttttgctgtactacgccttcgtggcacgagggaccggcgttttagccgactacaccgagttctccggcaacttcacctccattgcttctcagtgcctccagaaacttcctgcttccaacaacaagttcacttacaactgcgacggccattcctttaactatctcgttgataacggctttggggggtgggtggttgctgttgaatctgctgggcgacaggtgccaattgcctttcttgagagaattaaggaggattttaccaagagatatggtggaggaaaagctgcagctgctcctgcaaacagcttgagcaaggagtttgggccaaagttgaaggagcatatgcagtattgcattgatcatccagaggaggttagtaagattgccaaagtgaaagctcaagtttcagaagtcaaaggagttatgatggaaaacattgagaaggttctggaccgtggtgaaaaaattgagcttttggtggataaatcagaaaatcttcgctcccaggcacaagatttcaggcagcaggggacccagatgaggagaaagatgtggttacagaacatgaaaataaagctgatcgtgctc

SEQ ID NO: 15280 - DNA, 583 bp, Gossypium hirsutum
  Clone ID: LIB3829-023-Q6-K6-G9
ccgtccggttcaggaaagccctacttgccttgcgaaattcttggcatttatcaggtctctgtaaacacctgaaggtggcaaagaacaaaatggatcttacagtgatggagaacctatttttcaggagaagtatctcaacagtttatgatcttaagggttccataagatcacgatacaatccggatacatcagggacaaacaaagtactgttagatatgaatctgttggaaacgctgcgaacagagcctatttttctcggaagcaaggcaaagagaaacctcgagagagctatttggaatgatacatcttttctggcatcggtcgatgtcatggactattcattactcgttggggtggatgaggagcgcaaagagctggttttgggaattatcgatttcatgagacaatatacttgggacaagcacttggagacatgggttaaggcatcagggatactaggtggcccaaagaatgcatccccaacaataatttctccgaaacagtacaagaaaagattccgaaaggcgatgactacatattttctaaccatacccgatcaatggagttcatgacctgtttcatc

SEQ ID NO: 15281 - DNA, 556 bp, Gossypium hirsutum
  unsure (1)..(556): unsure at all n locations; Clone ID: LIB3829-023-Q6-K6-H10
aggttattaatctaagttcaaggagggggggaggcggggagnaggaaagggaggcaagggactgggcaagggaggagcaaagcgccatcgtaaggttctccgtgataatatccagggtatcacaaagccggcaattcggcgtttggctcgtagaggaggcgtcaagcgtatcagcggggtagggtacgaggaaacccgtggggttttgaagatcttcttggagaacgtgattcgtgatgcagtaacctacaccgaacatgcgaggaggaagactgtgactgctatggatgtggtttatgcactgaagaggcagggcaggacattgtatgggtttggtggttagatgatttagggattagatctttctgcgatgttggcggatctggactagttctcatgatatcaagaatgttttaggattaggaatagggcttgtaattaaagggtgctattgggattattggaatttataatttggtcgtgtggttttctttggtgatttgtaattcgtgccatgaattgcagattttaatgaaatttggaatttaatttcggc

SEQ ID NO: 15282 - DNA, 578 bp, Gossypium hirsutum
  Clone ID: LIB3829-023-Q6-K6-H12
tcgtctattcaagtggcctgataagccagaggttgggttgaagttacaaaggagtacagcgagaagttgatgggcctagcttgcaagcttcttgaggtgttgtcagaggccatgggtttagagaaggaggccttgactaaggcatgtgtggacatggatcagaaagtggtggttaacttctatcctaaatgccctcaacctgacctcactttaggactcaagcgccacactgacccaggcaccatcacactcttgcttcaagaccaagttggtgggcttcaggccacccgggacaatggcaagacttggatcactgtccaacctgtggaaggagcctttgtggtcaaccttggagaccatggccattatctgagcaatgggaggttcaagaatgctgatcaccaagcagtggtgaactcagactgcagcagattgtcaatagccacgttccaaaatccagcacccgatgccacagtgtatccattgaagatcagagagggagataaaccaatccttgaggagcccatcacatttgctgagatgtataggaggaagatgagcaaggatcttgagcttgc

SEQ ID NO: 15283 - DNA, 404 bp, Gossypium hirsutum
  Clone ID: LIB3829-023-Q6-K6-H7
cgatgtccttgttccttttacaaccctggaaggagctgttatatatccagcacctgctttggtggcaaagaactgagaacccatgcgtacccgaaattctgttcgaggactacatgaaggtctaccccgccctgttatttcgaagacaaggagccgaggttcgaaggcgggaggaccatggaatccatcgttagcttgggtcctattgcaactgtttgaaccacccatttagatcaatgggtttaatatatagtttgtttttgttgataaactaagtctgataaatgctctgatggatccatcctgttatattatgggaactttgtagtttgactaagctactaagagttccactaggaaccctgatagtggtttatatatatgatactaataaatttccctga

SEQ ID NO: 15284 - DNA, 573 bp, Gossypium hirsutum
  Clone ID: LIB3829-023-Q6-K6-H8
cttcactctttttggcaatcaattttgtaagcaagtatggctaaggacgttgaggttggtggtgagttccaagccaaggactaccatgatcctccaccagctccattggtggacggggaggagttgacaaagtggtcattttatagggctgtaatagccgagtttattgccacgctcttatttttatacatcactgtgttgacagtgatcggatacaagagtcaggttgaccctgataagggcagtgacgaatgtggtggtgttggcattcttggcattgcttgggcttttggtgggatgatctttatccttgtttactgcactgctggtatctctggaggacacatcaacccagcagtgacctttgggcttttcttggctaggaaggtgtccttagttcgagccatattttatatgactgctcaatgtttgggagccatttgtggatgtgggctagtgaaggcattccaaaagtcatattacaacaagtatggaggaggagccaacagcctcgctgatggatacagcactggaactggtttggcagctgaaatcattggtacctttgtcctt

SEQ ID NO: 15285 - DNA, 578 bp, Gossypium hirsutum
  unsure (1)..(578): unsure at all n locations; Clone ID: LIB3829-023-Q6-K6-H9
ctctagnatcttcccttgtccgtggggaaatctgtcactgtgatcattaatggccaccgctgaacctgaagttccagtcactgagcagcagcccgcggcagcagaggagccaaagccggcgngaaaagcctgtgaaggagaagagacccagagctccaaaggagaaaaagcctaagcgggcgcgaaatccgcagcacatcctccttattttcagatgatcaaggaggcgcttttggctttgaaagagaagagtggatcaagtccgtacgctatagcgaaatacatggaagagaagcacaaggcggtgcttccagcgaatttcaggaaaatcttaggtcttcagcttaaaaactcagctgccagaggcaagctgataaagatcaaggcctcttacaagctctccgaagccggcaaaaaagagagagcccctgttacgaaagctaagatggagaagaaagctaagccagcttcgaagccgaagaaagctgaggcgacaaagaagccaacaaagagagtcggggccaagaagaaatcaactccagcaaagccgaagcagcctaaatctatcaagtcacctg

SEQ ID NO: 15286 - DNA, 521 bp, Gossypium hirsutum
  unsure (1)..(521): unsure at all n locations; Clone ID: LIB3829-024-Q6-K6-A10
ccggttcgacccagcttttttaatttttcaactttgnttaatgggctttggggggggggaagattatgaggccgttcgtatgttcgatgaatgactgaaaaagttatcaacctaatttgattgtttacagtacaatgcttaagggattgtgtaagaccggtaatactggtagagctgttaggtttctgaggctgagggaaagcagaggttatgaacccgatattgtagcatatagcactgtcattgactgcctttgtaagaacggtttgttacaggaggctctcaatctcttatctgaaatgaaggttaagggcattagaccagatatcattacttgcacttgcttaattcatggtatgtgttatttgtgccagcaggaggaggcaacaaggcttttaaatgaaatggctgataacaatattttacttgatattngtacatatactttattgattgatgctctttgcaaggtaaggaatgatttctaaagctgctcagatcgtttactcaatgtacaaagt

SEQ ID NO: 15287 - DNA, 544 bp, Gossypium hirsutum
  unsure (1)..(544): unsure at all n locations; Clone ID: LIB3829-024-Q6-K6-A11
ggcttacaagaacgtgtcagagctatggaggaagaagcaatccgatgttatgaggttcttgcagagagtgaggtgttgggagtaccgtcaacacccttccattgtgcgagttaaccacccaactcgtcctgacaagggtgggggggggggatacaaagccaagcagggttatgttgtctatcgtgtccgtgtgagacgaggtggaaggaagagaccagtacctaagggtattgtgtatgggaaacccacaaaccagggtgtcactcagctgaaatttcagcgcagcaagcgatcagttgcagaggaacgagctggtcgaaagcttggaggccttagggttgtaaactcatattggatcaacgaggattcaacatacaaatacttcgaggtcatcttggttgatactgcccacaatgctatccgcaatgacccacgcaatcaactggatctgtaatccagtgcacaagcacagggnaactccgcggactcacctctgctggaaagaaatataggggtcttcgtggcaagggacacttgcaccaca

SEQ ID NO: 15288 - DNA, 602 bp, Gossypium hirsutum
  unsure (1)..(602): unsure at all n locations; Clone ID: LIB3829-024-Q6-K6-A12
cccggtcgacccagcgttcggttcaagcaagnatcccttacctttcgggaatggggggggatatccgcctccaccgcctgttccacctcctaaaccttcagcagctaattcgaattcaagaagatttgcctcaggaagttcaaatcctgttcgtgctggatcatctagaagagctgttgcctggcccactgtttcaataaggacatcaccgtctgggtcacgtccatcttctcctagatctcatggtgagagtgagggttacaatagtgctgatgagcagaatccatgctttgtatcctcctacaatgatgcagaaagagaacgccaattcgaaatagatatcatacgagcaaaaggcttagaagttaaacggatgctagaagatgggaactgcctcttccgtgctgttgctgatcaagtgtatggggactctgaagcttatgatttaattcgacaaatgtgcattgattacatggagcgagagagggatcacttttctcagtttataacagaaggttttacatcttattgtaagaggaaaagaagagataaggtctatgggaacaacgtggagattcaagcgttatctgaaatgtataaca

SEQ ID NO: 15289 - DNA, 582 bp, Gossypium hirsutum
  unsure (1)..(582): unsure at all n locations; Clone ID: LIB3829-024-Q6-K6-A7
ttcgttttttcagnatagaagcttcactaagcttactccctccctccttcccgctctctgtttctgtcgcttccatggctgtcttgtttaaaatgcctgtcgttttgggtttctttgtgggtcttatgatgctgggtttggctagctcagctgagtttcatgagctttttcaacctggttgggcaaacgatcatttcatctatgaaggagagcttcttaagctcaaacttgataacttttctggtgctgggtttgcatcaaaaagcaggtatttgtttggaaaagtatccatgcagattaaacttgtagagggtgactctgctgggactgtcactgcttactatatgtcatcggagggtccataccacaatgagttcgacttcgagttcctgggcaataccacaggtgaaccttaccttctccagaccaatgtgtacgtgaatggtgtagggaacagagagcaaagaatgaacctttggtttgaccccaccaaggacttccactcttacactctcctttggaaccagcgccaagttgtatttctagtggatgagacaccaataagagtgcacaccaacatgg

SEQ ID NO: 15290 - DNA, 547 bp, Gossypium hirsutum
  unsure (1)..(547): unsure at all n locations; Clone ID: LIB3829-024-Q6-K6-A8
ttcttattttattcccaaatctgnaaagtgactggtgtggagtatgcctgagcttatttctcacaagcttcgcccnatatgagaaagttatcattatattgctctactcaaggctgtgatgagattgtcattgacttctttgaaagcagctgatgtcaaagatattgcatcttcggtcaccggagtggcgggatgaaaagctaaaagcagaaaaagaagccacaactaaaaagaagacagttgggaagaaaaagcagctccatgttgataaaccagatgatgatttggtggttgctgcttatgatgacattgatgattacgactttatgtgattcatttttgggcaaatgccacccaccttcaagcgtttgcactacggatccttgggttaccacaacaaccatatatatgcagatccggcggctcttctcttttttaatttttccctttctttcttcttccaattcttggagaaatttagttgtctgatgaatagtctatccataatatggatgatattgttacatgaagaaaaccattagnttna

SEQ ID NO: 15291 - DNA, 571 bp, Gossypium hirsutum
  Clone ID: LIB3829-024-Q6-K6-A9
cccggtttgacccagctttttaaaacacagctatcactggctgcgcagtgggggcaccaaaagaagattgaggaagagaaccggattagagagggatgaaggaataggaagagggacagtgagaaggattacgaaagagtgggaaaggttgagggtggcggaagaggcggaggaaaggcggtggtctcagctgggcgagctggaagcagagtccgttaatcaggcccgtgcttacaactcccacatacttaccctcatggaccagctctccaagggtaacaaccttctcatcaacaaccacccatcccctgcacccatctccatcctctgattctgcttttggctgatgttctttttatctatctaaccaaaggcatggggattctaaattcgttaattttgggtatggtatggatctatatatgtaatagttgttaacacttggtggtgtttgttgatgttaattggtaaaggtagtgctgatatgtttcactggctgtttcatattgtgaaactcaattaagttgatttaattctgatatataaaaaaatttgtgcttttttcttcttc

SEQ ID NO: 15292 - DNA, 578 bp, Gossypium hirsutum
  Clone ID: LIB3829-024-Q6-K6-B11
gcgttctttttgtctcaaactgctttccaatttcaagcgggggggctctttatctctctctaaagttgcaatttttactatttgaaaccttcaaaaacaaaaacaaaaacaaaaaatactagcaagaaggaagatagttagctcccctccccccttttgattaaaacccacgaaatctttttggaggagagcctacttgtttcttggcagagaatttttgatcaaattttcttgggagattcctgtcgaaagtttgggtatttcttggtggattttggtcgttaggttgaaagactaaaagggtttttattttatagaaagaaggaatagtatgaagatcaaagaagatgatcaagaagctgtgaagggcttttagctttagacaagggttctgttgctttgaatttctaggagagaaaagttaaagcttcctagccaatttggttgaagacttgagaaggatatttaagttcagagtaataacgaacaagcaaaacattatggttgcaaagggacgccagaatgccactgactctcagaaagtggaggtgggagagatagatactagtgcacctttc

SEQ ID NO: 15293 - DNA, 591 bp, Gossypium hirsutum
  unsure (1)..(591): unsure at all n locations; Clone ID: LIB3829-024-Q6-K6-B12
gcgttcttgttattttcccacccttctttcccgngagggggggggtgggtgggaatttatctcgggnaaagcgagggtttattacaaacacagctatatagtggagcagtaatcatgagctttcgagatctggaagccggacggccattggtgtcgaggcaaaacctaatcaacggcaagcaagacgccacgcaggggggggcctctggcattttccagatcaacaccgcagtctccacctttcagcggctcgtcaacgccctcggtactcctaaggatacgcctgagctccgagaaaagctgcataaaacaaggctacatattgggcaattagtgaaggacacttcggctaaacttaaacaagctagtgaaacagatcacagtgccggaattagtgccagcaagaaggtagcagatgctaaacttgcaaaagattttcaagcagttttgaaagagtttcagaaggctcaacgacttgcagctgaaagggaaacatcatacgctccatctgttcccaaggcagttcttccttcaagttactcggctgatgaggtagatgtaggttcagatggaggggctgtacagcaagcc

SEQ ID NO: 15294 - DNA, 574 bp, Gossypium hirsutum
  Clone ID: LIB3829-024-Q6-K6-B7
gtacattgtgttaacccaccaatagaaccaagccaagtaaacttttgaccttctatccttcttaaccacaacataccctcaccataatttcaattctgcacttgtgacttcctttccactttcttcatttttttttgtagtgcagcagaactctcttggcacgcaccttcaccattctatctgcatttgaacaataggatctttgctaataatggatatttctcactgggtctttgttgtttcggttcttctcctctttttggcatctggatctttctcaatcgacaattttcaccaaccatttcctattgtggagcctgatcctggtcatacaaagcttcgcctttcgagggaaggcttggaagccatcagcagaataaataccccaattgcagctgttgctgtcataggtccctaccgctctggcaaatcttttctgctgaatcaacttcaatcactgtcttgttatgaaggatttggtgttgggcacatgcgtgacacaaaaacaaagggaatttgggtttggggaataccgctagaattggatattgatggagtaagaacttctgtcttt

SEQ ID NO: 15295 - DNA, 562 bp, Gossypium hirsutum
  Clone ID: LIB3829-024-Q6-K6-B8
ctttctggtttaatccttcttttactttgtctttatgatcttaactatttcactggattttgttaaaagaaaaaaaaaggttgtgaagtattgagggtgtttattatttgttgtttttttataattactgatgtctccgccgctgcttggcgtggaggaggaagggattcagagcaatgttactttactcggttcttcaggctcaatggaaagtgtgtgccagaatagtgctgacttgaaggaacggaactacatgggcttgtctgattgttcttcagtggatagctctgttttttcccctccgtccgaggaaagaaaggctagtttgaatctaaaggcgactgagcttaggctcggacttcctggattgcagtcgcctgaaagaaatccagagctttgcttgttaagttcttctcagcttgatgagaagccgtttttccctttgcatccttcaagtgatggtcactgctttgcatcacagaagagtgttgtttcagggaataaaagagggttctctgatgcaatggatgggttctcagagggcaagtttctttctgattca

SEQ ID NO: 15296 - DNA, 575 bp, Gossypium hirsutum
  unsure (1)..(575): unsure at all n locations; Clone ID: LIB3829-024-Q6-K6-B9
tcgacaaacaagnctgggngaaagtttttgcatttggcggtgtctggtttccaaacaccggcttttcgaagagtggaccgacaagttaatcttatgaaacgactggtacatgcaaaaaatttcagcatggaagacattgttaatgctaaaaacaatgatgggaggactgctctccacatggccatcattgggaatgttcatactgatctagttgaactcctgatgtctgcaaaatcaatcaatgtgaacattcgtgatgcggatggaatgactccactcgatcttctgaaacaaaggccgcattcagcttcatcggatatacttattcgacacttgatttcagcaggtgggatgtttggttgtcaggattacactgcaagaagagcaatagcttcacacataaagatgcaaggccacgggagcagccctggaacttctttcaggatatccgacacccaaatattcttgtacaccggcgttgagacgacatcggatgctagcgatctcggcagtggaggaaagagtcgttcatcgtcaactgatttcgattcagctgatgaaaataggaagtcatc

SEQ ID NO: 15297 - DNA, 588 bp, Gossypium hirsutum
  unsure (1)..(588): unsure at all n locations; Clone ID: LIB3829-024-Q6-K6-C10
tcgngttcgtgatcttttcaanaggccaaggagaatgccccctgtatcgtctttgtggatgaaattgatgccgttggacgacaaagaggaactggtattggtggagggaatgacgagagagagcaaactcttaaccagcttttgaccgaaatggatggtttcgagggtaacaccggtatcatcgtaattgcagcaactaacagagctgacattcttgattccgctttgttgaggccaggacggtttgatagacaggtcactgttgatgttccggatatcagaggtagaactgagatactaaaggttcatggtagcaacaagaagttcgaaactgatgtatcatttgatgttatagccatgagaacgcctggttttagtggagcagatctagcaaatctgttaaacgaagctgctatattggctggtcggcgtggcaagaccgcaatttcatctaaagaaatcgatgattcaattgataggatcgtggctggaatggaaggaacagttatgactgatggaaagagcaaaagcttggttgcataccacgaggttggccatgccatttgcggaactttgacaccgggtcac

SEQ ID NO: 15298 - DNA, 534 bp, Gossypium hirsutum
  Clone ID: LIB3829-024-Q6-K6-C11
gcctgtgcacagtgggggggggggggggtgagataagaaagatgaagcaggagatgatcaagatgaagatgcagatgaggaggatgcatctggtgaagatgaaggagatccagaagatgaacccgaggccaatggggttggtgccagtggagacgaggatgatgagggggggggtgatgacgacgatgacgacgatgatggtgaggaagaggaggaagaagaagaagaggaagacgaggatgaagaggaagagcttcagccaccggctaaaaagcgaaaatgagcttgaatctcttgttgttttttattatcttgttgaggttaggggtatggtgtagttggaagttagaatgagccgattcaagttacggactaagggtgtctgtctaaattagggtagagaacattgtgaaatttctggagaatcagacttgtttgatactttcctaatatacggttctagcaccattgtattataatctttgcttcaattcttttctcctaaaaaaaaaaaaaaaacacaacaaacaaagg

SEQ ID NO: 15299 - DNA, 586 bp, Gossypium hirsutum
  Clone ID: LIB3829-024-Q6-K6-C12
ttcttaaaaacgaacaaaaacacggggaggggggggggtaaggtgaaatggcctggtgtagtttaaggtctattcacgttccaaccgtcgatgtcggattactacgaactcgctccccgttagccgctgtcggtggagtcgttgccggctcttcatttttgcgatcttccgcagggggggtctccttttgcttgcttaagcctatccacttctcctgggattaaggaggctgtggcaactaacaaagctccagcagcattgggaccatattctcaggccatcaaggccaataatcttctctttgtctctggtgttctcggccttattccagagactggaaagttcatctcagacagtgtagaggatcagaccgagcaggtactgaaaaatatgggagaaatactgaaagctagtggtgctgactattcctctgtggttaagacgacaattatgctagctgacttgaaagacttcaagaaagtaaatgagatctatgctaaatactttccttcaccagcaccggctcgttcaacatatcaggtagctgcattgccattggatgccaagattgaaattgaatgcattg

SEQ ID NO: 15300 - DNA, 560 bp, Gossypium hirsutum
  unsure (1)..(560): unsure at all n locations; Clone ID: LIB3829-024-Q6-K6-C8
gcgttcgggnacttcctccttcgatccagatggtactatatcagagctgcttcctggcaaggaagaatacttgaggggaggtctaggtgttggtgcctttaggaggatttatggaggggctaagagaaatggaagtcgcccacgccatttctgcaagagtagtggatctgttgcccgtcacattcttcagcaattgcagaatgtgaacatcattgatattgatcctaaaggtggaaggagaatcacatcaaacggtcagcgtgatctggaccaagtagctggaaggattgcggttgccatctgagaaattttaagagagctgttgccgaaggctgtgttaatcaattttcgtgttggtatatccgctacgtgggaattttttttttaaattttaattttagaaaccaatgtggttggtgtttaactatgaccatgaattttgaattctaatggaagattgtatggtgaagttgcccttctgcatgtttacagttttcattctcactggattgtccagcactgaacacttagttctgattcagttttgtgttttaaagtaa

SEQ ID NO: 15301 - DNA, 593 bp, Gossypium hirsutum
  unsure (1)..(593): unsure at all n locations; Clone ID: LIB3829-024-Q6-K6-C9
tccgcggncgcgtggggcaatgaccggtcagcttaccattgaaatcggacgtttatagttttggtgttgttttgcttgaaacattactggaaggaaagctatcgacaattcgagagctggtggtgagcaaaatctagttgcctgggctcgtcctttgtttaaagatagaaggaaattcgcgcaaatggccgacccattacttcagggacaatatccggtaagaggtttgtaccaagctctagctgtggctgcaatgtgtgttcaagaacagccgaatatgcgaccacttatagccgatgtagtcactgccctcacctatcttgcttctcaaaagtatgatccaggaactcagacggttcaaggatctcgtaccggttcttccactccgagaatgagacgggaatagtttcaggtaagggaaagtaaccatttactcctatgagaagaattgaatctcttggcagctgatgattgagattaagaagcaacaggtttttatatgttttgagatttacaattctcgggcctggagtcccttgccaatctgtccccggatgtggaaatttgtgagtccggatggccggtccgatgcc

SEQ ID NO: 15302 - DNA, 598 bp, Gossypium hirsutum
  unsure (1)..(598): unsure at all n locations; Clone ID: LIB3829-024-Q6-K6-D10
tccgaaaacgggnacgtatatttcctcggttacaaaactttcataccagaggaaggtgatgattttggtatgtctagcgaagaagaaagcgaggaggaggaagaggaggagcttcctgttgctgctgctgctgctgcagtaaatggaaaagctaagccagatggaaaaacagccaaggctaatgctgggaaacctgatgctgttaaacaatctggcaagatagcagaacctagcagtaacaagaaatctgaggatgaagatgatgatgatgagtccgaggatgagagtggttctgatgaggaagatgattctgatgacgatgacgagtctgatgagatgtctatggatgaaagttcagatgacgaggatgaggagacacctaagaaggtcgagtcaagcaagaagagacctgctgaagctgcaacccctgcttctgcaaaaaaggctaaatctgcagttacacctcagaagacagatggtaagaagggtggacacacagcaacaccgcatccagcaaagcaatctgggaaaaattctgcaaagtctccaaagtctggtggtcaattctcttgtggttcttgtaacaagtcgttcgggt

SEQ ID NO: 15303 - DNA, 581 bp, Gossypium hirsutum
  Clone ID: LIB3829-024-Q6-K6-D11
ttcgattatctgcatgcacggtggcatagggagaggagctgggggtgtgcggtcgaacagatagagaaactcgagcgaccgataacaatggatgcaggatccattattttaatggacctgttatggtctgatccaacagaaaatgatagcatagaaggtttgagacctaatgctcgaggtcccggggttgggacttttgggccggatcgtgtgacggacttctgtaagaaaaacaagctacaacttattataagggcacacgaatgtgtaatggacgggttcgaacgattcgctcagggtcaattaattactcttttttctgcaacaaactattgtggtactgcaaacaatgctggagccatattagtcgttggtagaggactggttatcgtcccgaagttaatacatcccttaccacctcccattcagtctccagaaacatcgccggagcgtgttggagacgacacatggatgcaagaactaaacatccaaagaccaccaacaccaactcgtggtcgccctcaacccgaccacgaccggagctcacttgcatatatatgaacacggcattacaaattcaa

SEQ ID NO: 15304 - DNA, 569 bp, Gossypium hirsutum
  Clone ID: LIB3829-024-Q6-K6-D12
cgtgggcggccgcgtggggggagggggagaagggctaattacattgcctgtaaccctactgtgcctctgccgtgaacggagttgctatctcggagtggaaaaaccgtctttgatgcaaggatctcccccacttcatttctttcaagcaggcctgtagttgatctgggaggggggggggcaaaggctgcgtcaaaaagaactgtgacccttgttctttgataatcctgttgaatatttccattagactgaaggattaaccagagtccacagcagaataatcggatctgttcattagtctccttacagaagccccagggcactattgaaaaatatggctactgtcttcctcattttgacgacattgagggcactgatcttccaccacgactcttttatgtctgaggttaacaagggacaaaataaagttccaagagattctacatactgtaattataatttttgaggggatgtataatttccatagtttcctatagaaatttttagttcggcgtgtaaactataactactaggatccaagttagtctcctgtaatagtttataggtgctca

SEQ ID NO: 15305 - DNA, 566 bp, Gossypium hirsutum
  unsure (1)..(566): unsure at all n locations; Clone ID: LIB3829-024-Q6-K6-D7
cggncgcgtgggcggncgcgtgggcgggcgcgtgggcggacgcgtgggcggacgcgtgggtttttttttttttttttttttaataatacctttcaagcggaaacaactcagaaaattttactgatgccgttagcagagatagagtatgaagacgtccaagtctggaagggagaattattcggtgaattttctgtacacagcacctataaactattacaagaggctaccctaaatcctactagttatttattacagaccaaatataaagaattttatagaaaattatggggcttacagttacccccaaaaattacaatgactatttggcagtttgcggcttccagtttatactgacccacctagatggtaggcaacttctcattaagacccatcctggtgaagtggttaagcctgatcaatgcaaggccataaatgatgaagggatgcctatgtatcaaaggccattcatgaggggtaaactatacattcactttaccgttgattttcctgactccttggcccccgagcagtgcaaggcactcgaggctgtgctaccttcgagggcc

SEQ ID NO: 15306 - DNA, 554 bp, Gossypium hirsutum
  unsure (1)..(554): unsure at all n locations; Clone ID: LIB3829-024-Q6-K6-D8
tgcaaggaagnaattttatgngnngtggtgctggagaatgcgtgcaagtcagaaccccagtntnngtctcattttccgtgnnaaacttgtccttagnanagnngtcttgcaggnactgtgtatgtagcnnaagtctcccaaccaagcacaacgcggtgtggggcatggnnaagctcgaccctttggaggaaggtcntggctgaagccattgatgaaggtcgtattggtccaagagatgatcccaaggttcgttcaaaaattttggctgaggagtatggatgggacaaagatcttgctaagaagatatggtgttttggccctgagaccacaggtcctaacatggtggttgatgtgtaaaggagttcagtacctgaatgaaattaaggattcagtagtcgctgggttccaatgggcatcaaaggaaggtgcaatggccgaagagaacatgaggggtatatgctttgaagtttgtgatgtggttcttcatactgatgctatccatagaggtgggggtcagatcattccaactgctaggagggttttctatgcttctc

SEQ ID NO: 15307 - DNA, 577 bp, Gossypium hirsutum
  unsure (1)..(577): unsure at all n locations; Clone ID: LIB3829-024-Q6-K6-D9
ctcgnacgtctgagaagtgaagccattacatcattgcttctgactggnaanaanaacgagcacatgacagaagattgttttgtaatgaattccacctcgttgatcttcgagtcatggagaattgcttgaaagtttccaaaggagtggaccatgtcttcaacctcgctgccgatatgggtgggatgggtttcattcagtcaaaccactctgtcattatgtacaacaacactatgatcagtttcaacatgcttgaggctgctaggattagtggagttaagaggtttttctatgcctcgagtgcttgtatctaccctgaatttaagcagttggacactaatgtgagcctaaaagaatccgatgcctggcctgctgagcctcaagatgcttatggcttggaaaagcttgcaactgaggagttgtgcaagcactacaccaaagattttggaatcgagtgtcgtattggaaggtttcacaacatttatggtccttttggaacatggaaaggtggaagggagaaggctccagctgccttttgcagaaaagctattacttccattgacaagtttgagatgtgggg

SEQ ID NO: 15308 - DNA, 238 bp, Gossypium hirsutum
  unsure (1)..(238): unsure at all n locations; Clone ID: LIB3829-024-Q6-K6-E10
cgncattgntatcattagtttgtggttttggttgttcttgtctttgttattcataattgcgataaacatgatgcaaccgaaacgtgtggatgtgaacctgcatttcttcttatgaatcagagatatagtaatcttactacaggcataggttttatgaagaatttcaacttaaaacttgttaatagacctaatattttgttgcctatctttctctttaagcatgagcttattccttttt

SEQ ID NO: 15309 - DNA, 560 bp, Gossypium hirsutum
  unsure (1)..(560): unsure at all n locations; Clone ID: LIB3829-024-Q6-K6-E11
ttgttctanacgcgatggccgccctggggggtgttgttgggaatacaaaactcggagatattaaagctcaatatagaaaccaggagaaaaaacatcttagttatggagggactcataagacatgtacaaagaagattgactgctctcaccaacccatcagcattcttctaactgtggggggggctgatttctagctaacgtactcaataattggaatccgcagttctcatccaaaaggaatctgtagacttcccattctcgatctgaactcgaatatcttccaatttcagccgaaaatatgcaaattccaagagcctttaaagctagtgtaacatcatagaaaactcttggtctcccctttccagataactcaactggattagcaaccagaagttctgtatcaggcccccggtttgcgatgatgacacgcaatgggtgaagcatttccaccttcaaacgagagcatagcccattttgcttctcaggatccacaaactttttgccatccttttgctgaataaagaggtccaaatcacggtagcctttggaatttggtgaga

SEQ ID NO: 15310 - DNA, 531 bp, Gossypium hirsutum
  Clone ID: LIB3829-024-Q6-K6-E12
ttgctctccaaagcgatgatattgagctcgttgctgttaacgatcctttcatcaccactgaatacatgacgtacatgtttaagtacgacagtgttcacttttaatggaagcatcatgagcttaaggtgagggaggcgaagacccttctctttggtgaaaagcctgtcacagttttcggtatcagaaaccctgaggaaatcccatgggctgaggctggagctgagtatgttgttgagtctactggtgtttttactgacaaggacaaggctgctgctcacttgaagggtggcgcgaagaaggttatcatttctgctcccagtaaggatgctcccatgtttgttgtgggtgtcaatgagaaggaatataagcctgaccttaacattgtctccaatgctagctgcaccaccaactgtcttgctccattggctaaggtgatcaacgataaatttggcattgttgagggtcttatgaccactgttcattctattactgctacacaaaagactgttgatggtccttccatgaaggact

SEQ ID NO: 15311 - DNA, 606 bp, Gossypium hirsutum
  unsure (1)..(606): unsure at all n locations; Clone ID: LIB3829-024-Q6-K6-E7
cgtttcgcaatttcattcagttaccaaattttatttgctcaacgggnnagggaaagttagtgnnttaggtgagatcaatatgaaatcgccggcgtcaggcttcatggnaaagcccctctaaagttcaggatgccaaccagctgaaaatttaatacccattaggcttgacatagaagtcgatggacagcgctataaagatgctttcacttggaacccttatgatccggattcagaggtggtgatgtttgcaaaaaggactgtaaaagacttgaagcttgcccctggtttccttccgcaaattgttcaatccattcagtcacagcttgccacctttcgatcatatgaaggtcaagacatgtatgttggtgacaagatcattccaattaagcttgatcttcaagtcaatcatacagttatcagggatcagtttttatgggacttgaacaactttgatagtgatcctgaagaatttgctagaactctgtgcaaagatttaggtattgaagaccctgaagttgggcctgcagttgcctttgcaatcagggagcaactttatgagattgcaattcaaaatgtaacttcagcaagggagaacagaataagcaa

SEQ ID NO: 15312 - DNA, 564 bp, Gossypium hirsutum
  unsure (1)..(564): unsure at all n locations; Clone ID: LIB3829-024-Q6-K6-E8
cacataatgttggngcttcatggaatccaaggagggaaaggaatgtaacttcacataaagagcgcccacactccccaaaccaaggtcctggtcttccagtcgaggcgcctccatcgaatatggataatagaaatgagcagcgttcagtctcagggttccgcaaaaatggaaaccaagctaaccgatatggcagagggcatgaatctcgtggtgattggggctcatctggtcaagaaaagcagcctaacccaccagcaaatcgtgagaggcagaggcacaattcacattacgagtaccagccagttggaccccaaaataataacaataatagtagagcaaataatcctgaaggaggaagagagggatctcatggcactggtgcaaggtacaaggagaggggtcagacacactcaaggcgtggtgggggtaacttccatggacgtctaagtggcattggtggttatgagtagggaggaagaaattgagggtaggtatgttattttgttttggcgtaaaccgcaatctgccatgaacaagaattggtttgatccccacatattttca

SEQ ID NO: 15313 - DNA, 592 bp, Gossypium hirsutum
  Clone ID: LIB3829-024-Q6-K6-E9
gcgttcggtttcactgtgcttgaaacgagcgggggcccatgaaaaggactgcaggaaaatattactggctggagagaattttaagaagctaccaatcaaggatctactccggtgatgttggcacttccttcaagattcaagatgaaggacgatctagggttagagaaactctgacaccttcgacagcgcagtcagcattacgaaggattctgccttacccttgcaaaaaacagtacactgtggtgattcttatgccacaagcatctcggtttaagttgttaagatcactattcaagcaaaatgctcctagtagagatgcaaagattttagcagccattgctggtggaacagtcttggcagcctgcttgtggagatattcacggaagtcatagcacaactgtacgtataaaagccttcaattgctccccgacctcaaaacttgaagcaagaattaggatcggatttttgttcattgatgttcaaccgtacaaccatacgggttgctctatggagcattcatattacaggtagtcaaggagaagtaaccaccaaatctactactgggttttcaataggggtgcttgtatactca

SEQ ID NO: 15314 - DNA, 571 bp, Gossypium hirsutum
  unsure (1)..(571): unsure at all n locations; Clone ID: LIB3829-024-Q6-K6-F10
tttcggnaggttgcttctgtatttcctgggggggggggggggccatttctttgcttcagccttccctggaggggctaatatgataagattagcgaaaagaagtgtcgacttctatagaggtgctctgtaagtcatatccatctgagtttttctctcgtatactgtcgttctctgcgggggggggataaacccgattattcctatttgaagaggcttttccgagacttgtttttaagagaagattaatagagtagaatatatgcattcaagaggttttcttcgccgtgacataaagcctgacaacttcttgatgggcctaggacgcaaggcaaatcagagaaatcaaaaacctcacaggcactgctcgttatgcaagtgttaacactcaccttggaattgagcaaagtcgcagagatgatttggaatcccttggttatgtgctcatgtatttcctgagaggaaggatgtgtatatgatcaccccatgctcatttcattcatggttctatattatttcttgttgctgagtctttgttctttgttttccttcgcattgattttgaatttggttc

SEQ ID NO: 15315 - DNA, 593 bp, Gossypium hirsutum
  unsure (1)..(593): unsure at all n locations; Clone ID: LIB3829-024-Q6-K6-F11
gcgttcggccctnctatgtagcacctgnagttgtaaacggggggacggtccagaagctgatgtgtggagtgctggggtgatcatctacattctcctgtgtggggtgcctccattttggggtgaaacggaagaagaaatatttgatgaggttttgaatggtgaacctgacttcacatctgatcctggggctagtatatctgaaagtgcgaaagatctattggcaaaaatgcttgttagaaaccccaagaagcggataactgcacacgaagtactacgacacagttgggttcaggctgatggggtggcaccggacagcccacttgattctttagtcctaggacgcatgaagcaattttcttcaatgaacaagctcaagaaaatggccttaagagtcattgcacaaaggctttctcaagaagaaatagcgggattgaaggaaatgtttaagatgatagacacggataatagtggtcaaatcacgtttgaagaactcaaagctggattgcaaagctttggtgctagtcttcctgaatcagaatttcaagctctaatgcaggctgcggacgtaaataacagtggttcaatcgattatc

SEQ ID NO: 15316 - DNA, 525 bp, Gossypium hirsutum
  Clone ID: LIB3829-024-Q6-K6-F12
ctttctccgaagttcctccttcgttcttttatttattcagtattgtaaaagatggccgacggtgaggatattcaacccctcgtctgtgataatggaactggtttggtgaaggccggttttgctggggggggggggcaaggcagtttttcccagtattgttggtcgtccccggcacactggtgttatggttgggatgggtcagaaggatgcctatgtaggagatgaagcacaatctaaaagaggtatccttactttgaaatatcctattgagcatggtattgtgagcaactgggatgatatggaaaagatttggcatcatacattctacaacgaactccgtgttgctcctgaggagcaccctgtgcttctcacggaagcacctctcaaccccaaggccaatagagaaaagatgactcagatcatgtttgagaccttcaatgtacctgctatgtatgttgccatccaggccgttctctctttgtatgccagtggtcgtacaacaggtattgtgctggattccggtga

SEQ ID NO: 15317 - DNA, 519 bp, Gossypium hirsutum
  Clone ID: LIB3829-024-Q6-K6-F7
gcgtttcggtttccatagctttctattagaatttatagttttggtatgtaatattaaatcattaggatccaatgtagattcatgtaatagtttataggcgctcctaattgaaaactcgccggtcgactcccctctccaaacttgaaagtcttcatgttccatctccgccagtgggatcttcaaaagtgtttctgctacaatcggttggaagatcatctcgtattgaaattttatcaccttttcccaccctccagcaaagacctttttcgagcagacccttagtcgtccaaacactttttcaggatttcttcatcttcatcttcaagggatagaccagcaaattctgattccatgggcgtaacacgagaaaaccgaacgaagagaattattcaaaacactggagatgtaagccgtcaggccaagaaaaacttttgagaacctaaacttgccagagaggcagacagatacgtgctagggtagcagactcttaacaatggaattttacctatacacaagagt

SEQ ID NO: 15318 - DNA, 572 bp, Gossypium hirsutum
  Clone ID: LIB3829-024-Q6-K6-F8
tggtcatcaccaccatctcacagaggcataaaatttgaagaaaaggatgaagatgctgctcacagaaacgttcgcaaccggtaggtgacacaccagacaactctttgaatgcagataatgcaactcagcctgaaatccgtaagagaaagagttctgctggtaccaatgatggtaaatcagataccggttttgcagatggctctgcaaatagtgttaaaacctcggcactaaaggaaacttctcattcaccatcgaacttggtgtttggctatcttaatctcttctctgatggtgttcacaattttactgatgggatggctttgggaagtgcatttttgcttcatggatctgttggtgggtggtccagaactttatttttgcttgcacacgagcttccccaagaggttggtgactttggtatactggtaagatctgggttcagtgtttccaaagccctgttcttcaacttcctttcagcactggtggctctagcaggaactgcaatggctttgctttggggacaagatcctggacagtcatctttgattgaggggtttacagctggtggattt

SEQ ID NO: 15319 - DNA, 563 bp, Gossypium hirsutum
  Clone ID: LIB3829-024-Q6-K6-F9
ccgggttgaccagcgttttgcccctaacctgtcctgcactgggtggggctcgtcttactgagttagaagaatgggacttgcccttggctaaggcctgaggtaaaacccagttactgttgagtcacacgataatggacttggttccggttcgtgttcacactgtcctcatctccaccagcgggggggactgtctaacgatgaaattgctgctgacctaaaagcatgttatcaagcctgtcatccctgaaaagcacctcgtgagaagacaatcttccaccttaacccatctggtcggtttgtcattggtggccctcacggtgatgctggtcttactggacgtaagatcatcattgacacttatggtggctggggagcccacggtggtggtgcattttccggaaaagatcctaccaaggttgacaggagtggtgcttacattgttaggcaggctgctaagagcattgtagcaaatggccttgcccgaaggtgcctcgtgcaagtctcctatgcaattggtgtgtccgagcccttgtctgtcttcgttgacagctacggaactggaa

SEQ ID NO: 15320 - DNA, 546 bp, Gossypium hirsutum
  unsure (1)..(546): unsure at all n locations; Clone ID: LIB3829-024-Q6-K6-G10
ttggctgggntggtacctgatgactaatggaggggggagagttattcacttgggaaaggcagatttgattcgggcatacgaactggtgctgaaagggctgggatattgttcaaactttagttgatggaatggtagacgacctggtttcctcttgaattgcatacatgccgcatgatctgtgagtatcttttgtaaatcatgttgacatgctatctcactgaattatattttccatttctgataaagaaacaagctggtaaatttgtaaaaatgggtcatagatgggaaccatgttactctgactttttcatttcccacgaattatctgtgtccgagtaacataggaacggatggaggatggtatttttgcttggggccattggagagtattgtatgagcatttgtacctgtataatctttcatcttcaatgtaacttataactcttctgtaacaaatgattagcttgaagaactactcattaatagttgttgcctaaattggaaggtaaagatcccttcatttaatggtctatttgttaaggacta

SEQ ID NO: 15321 - DNA, 589 bp, Gossypium hirsutum
  unsure (1)..(589): unsure at all n locations; Clone ID: LIB3829-024-Q6-K6-G11
gcgttcgcttgnaaatgctcanagnagtgctccaaggagggtgtctagggaggctggaaagctaccaggttgcattatcattccaattttgctgataatcgaggacatattgatcattccgcgagggtaatgcgtgtcattacatggaatagttctttcagaggtatgacaaacggtngaaaacaggaaggatgagggggattctgaagagcacgagtctcacgccactgtcctggataagttgctagcatgggaaaagaaactttatgatgaagtaaagcaaggagagctgatgaagctcgagtataaaaggaaggtagcttggttaaacaagcagaagaaacgtggtgctagtgctgaatcattggagaaaacaaaggcagctgtaagtcatttgcatacaaggtacatagttgacatgcagtccatggattcaacagtgtcagaagttaatcgattacgtgatgagcagttatatccgaaacttgttatgcttgttgatgggatggctaacatgtgggcaagcatgtgcatacatcatgataggcaactcaaggttgttgaaaagcttaagtctcttgacgttgcc

SEQ ID NO: 15322 - DNA, 548 bp, Gossypium hirsutum
  unsure (1)..(548): unsure at all n locations; Clone ID: LIB3829-024-Q6-K6-G12
cgtgggcgaccccgcgggggggcgggtcggaggggaacatacttgatcagctcaatgatcttcaaagaaaggacatcttcttaatgaagccaataagaccctaaaacaaagttggtggaagggtatcaagtaaatttttttcatttgaatccaaatgcaacggaggggggggggggtggccntcaacaggttcatcatcancctcatggcgatgccttcttccatccattggattgtgagccgactttacaaatcggatatcagcatgatccaatgtcagtggtgactgcagggccaagtgtgaataattatatgacaggttggttaccatagtatatatatatctatatatctatatgaagaagaagaaaccatgggtatggatttcttcataagaaacttattttatgttattatatgaaacaaaagaaatgtgtaatgccatggatttattattattattattattattgtaactttgtgtttttaattaggatgcactataacaaactccatctgtgtgagctataatgtgcatctttctttga

SEQ ID NO: 15323 - DNA, 589 bp, Gossypium hirsutum
  Clone ID: LIB3829-024-Q6-K6-G7
gcgtttctcacgaatgaataaaattttgggttcctggccgagtccatatgcgatgaggccaaggattgcccttaacctcaaatccctcacttacgaatacattgaagagaagttatgggaaggcaaaagcgagcttcttctccaatcaaaccctgtttacaagtaaaatcccagtcctcattcacggggataacaagccaatctgcgaatctctcatcatcgtacaatacatcgacgaggcttggtcttccggtccttctattcttccttctgatccctgtgaacgtgctgtcgctcggttttgggctgcatatcttgacgacaagtggttcccagcggtgaaaagtataggagtcgctaaaggagaggaagcaaagaaagcagcaatagcgcaagtggaagcagggttggctttgatggaagaagcatacgacaagtgcagcaaagggaagggttactttggtggggatgaagttgggtaccttgatatagcttttgggagcttcttgggatggcttagagtgacggagaagttcaatgcgatgaagctgctggacgaggggaagacgcctggtctggtaaaatgggc

SEQ ID NO: 15324 - DNA, 595 bp, Gossypium hirsutum
  unsure (1)..(595): unsure at all n locations; Clone ID: LIB3829-024-Q6-K6-G8
ggtctcgttaacgctgtgaaggaataaacttcagaaatcttgcttagggagcacactgnatatnngttggagagcctgttcaccaaatggttagaaagcgtgttngagggttctcagnanagatccaggnngtcaacatgatgagttagtaggctaaatatttnntgaggagagggcagcacgtcgggagcgtaaatatcagaaattattatcaacctttgtattgccaagncganntatgatattgnntgaatggtgttgcttgaagnnctgagggaactacccaaatgatgcagccatggnnaccagaaagaggataacactgctngaagagaaaggagtacctgatttttggcttactgccatgaaaaacaatgatgtgctttctgatgagatcactgagcgtgatgaaggagctctcaaatatctcaaggatatcaagtggcataggatagaggaacccaaaggattcaagcttgagttttactttgaccccaatccttatttcaagaatactttgttgacaaagacatatcacatgattgatgaagatgaacctattcttgagagagctattggaacggagattgaacgg

SEQ ID NO: 15325 - DNA, 558 bp, Gossypium hirsutum
  Clone ID: LIB3829-024-Q6-K6-G9
gcgttcggttccaccatcaatgctgccaccaggggggcggggcttcctccaaacccacaaccaagcaagagctgcagtaggtgtcgcacctctcaaatggagccaacactagccaatgcttcagtctatcgcaggtaccaaagaacaaatggattgtcagttcgcaaacctgacaaaccagggggacggagcaaaccagttatggggtagcggagccgccgtgacgccgctcatggcggtggaaacttgggtaaaagagaaagattattatgattatgggactaatacttgtgcaccgaatcataaatgtggtgtttatactcaagttgtttggaagaattcttcggatttgggttgctcacaagctacatgcaaggatcaagttactttaactatttgtttttatattcctcctggtaattatataggtgagaaaccatactagaacaaaaccagctatatatatatgtgtgtatgtatgtatagcttgttgcaggatctgatctgatctgagagttattctgggaaatttcttgattatgtaggcaagtaggtaac

SEQ ID NO: 15326 - DNA, 587 bp, Gossypium hirsutum
  Clone ID: LIB3829-024-Q6-K6-H10
gcgtttttactcgtcctccgtctgcgcggtggggtgcagagcggggggaaaacctgactggcaagacaatcactctcgaggtcgagagctccgacacgatcgacaacgttaaagcgaagatccaagacaaggaaggcatccccccagaccagcaacgtctcatctttgccggaaaacaactcgaagacgggcgtaccttggccgactacaacatccagaaggagtcaactctccaccttgtccttcgtttgcgcggcgggatgcaaatcttcgttaagacgcttaccggaaagacgatcactctcgaggtcgagagctctgacacgatcgacaacgtgaaagccaaaatccaagacaaggaaggcatcccgccagaccagcaacgtctcatcttcgccggaaagcaactcgaggacgggcggactttagccgattacaatatccagaaggaatcgactcttcatctggttctacgtcttcgaggtgggatgcagatcttcgtcaagactttgaccggtaagaccattactttagaagtggagagctcggatacgattgataacgtgaaagcgaagattcaggacaaa

SEQ ID NO: 15327 - DNA, 577 bp, Gossypium hirsutum
  unsure (1)..(577): unsure at all n locations; Clone ID: LIB3829-024-Q6-K6-H11
gcgttttgctttatgtcacactgntgtatactggggggggggggggggttacactcctctgtttcctcgtatacttggtcatgaagcctcagggatcgtggagagtgtgggtgagggtgtgaatgatttgaaacctggggatcatgtgcttcctatcttcaccggagaatgcaaagaatgtggcggggggctgtcagaagaaagcaataacatgtgcgaactgcttaggatcaactgcgaccgaggtgttatgcttgctgatgggaaaaccagattttccatcaacggcaagcctatctaccactttgttggaacctcgacttttagccaatatactgtcgtccatgttggccaggttgccaagatcagtccaaccgccccgcttgataaagtctgtcccattagctgtgggatatgtacaggttttggggccactgtaaatgttgccaaacccaaaaagggtcaaactgttgcagtttttggactgggtgccgttggtcttgccgccgctgaaggtgcaagggtttgtggggcttctcggatcatcgctgttgatgtgaaccccagaagattgaag

SEQ ID NO: 15328 - DNA, 583 bp, Gossypium hirsutum
  unsure (1)..(583): unsure at all n locations; Clone ID: LIB3829-024-Q6-K6-H12
taaacgtttgtctcagaactcagnaagaggcgccgggggaagcaaaccgcccgtaagtctactggtgggaaggctccaaggaagcaacttgctaccaaggctgcccgtaaatctgccccaaccaccggtggtgtgaagaagcctcatcgataccgtcctggaactgttgctcttcgtgaaatgggtaaataccagaagagtactgagcttcttatcaggaaattgcctttccagaggcttgttcgtgaaattgcccaggacttcaagactgatttgcgtttccagagccatgctgttctagctctccaggaagctgcagaggcataccttgtgggtctttttgaagacaccaacctttgcgcgatccatgccaagcgtgtcacaattatgcccaaggacatccagttggctcgtaggatcaggggagagcgtgcttaatttccagaagtgtggatcagtcgcttagaagaaactattgtttatttttaggcaaatgtattggttttttgttttttctaatcatcttttaagccatgatggtagtggtaggttcaatgtgatgtgatgatgaagtgggagtctg

SEQ ID NO: 15329 - DNA, 592 bp, Gossypium hirsutum
  unsure (1)..(592): unsure at all n locations; Clone ID: LIB3829-024-Q6-K6-H7
gcgttcgctccagcttatggaacgccgatgactgggccacaaggnnggtggtctcgaaaggaccgactggtccaaagccccattcatagccgcatacaagagcttccacatcgacgggtgcgagtcgtcggtggaagccaagttctgcgccacacagggtaaagcggtggtgggaccaaaaggcattcgaggacctcgacgcctatcagtggcgcagactgcgttgggtccgcaacaagttcactatttacaactattgcagcgatagggtgaggtaccccacaatgtcgcccgagtgcaagagagacagagacgcttgagtcatttccatcaccaccgagtccaagttccccccttatattcttcactaccatatgagatccgtcattgtcctttagatttcaattgcttgttggccttcacttatttccacatcaatttcattatatgtaattttactcctaaaacatttgttttcgtgataatattatttaaacatagattacaatctcttgacaggggacaagagcattatcttgtaagtataagtataagaagcttggattcgatttcaagaaataaaagtctattt

SEQ ID NO: 15330 - DNA, 602 bp, Gossypium hirsutum
  unsure (1)..(602): unsure at all n locations; Clone ID: LIB3829-024-Q6-K6-H8
ccgggttgacccagcgtttttcttcatcagnaagcgagnatgatgaggggggagatgaagaagaagaagagatgatgaaggagaagaagaggaagaagaagaagaagtgaagcccaaaaagaagacactcctaagggaagataagaactctgaaggcttaaaaaacggaaaatacctaagaaggaggcagagatgcgtagggaggaagagaagcaagcatgcagaaagaaattcagatgataatagcaatgaagaagacagtgggagtgtctctgatgatggtcgctctcaatcttcttctgcaaaggcggtgaagagaaaagaaagcttctgctccagtgtatgggaaacgtgtggaacatctaaagtcggttatcaagtcatgtgggatgagtgttcctccctcgatctacaagagggtcaaacaggtccctgagaataaacgtgaagcccaattaattaaggaactagaggaggttctttccaaagaaggattatctgcaaagccttcagaaaaagaaatcaaggacgtgaggaagagaaaagaaagagcgagagagttagaagggattgacatgagtaatattgtgtcaagttcacgt

SEQ ID NO: 15331 - DNA, 593 bp, Gossypium hirsutum
  Clone ID: LIB3829-024-Q6-K6-H9
ccgggttgacccagcgttctcaatttcctaggaaattcttttctggtgtccttcctcttcagatttctctagatctccttcaatccggatttctcaaccctttctcctctcttccacgctgaaggcaagtgaagcttgtatcctccaggtatgtttcatctccctttcttaaagcttctgttgcaagttcatgaggggggggattctctgatctgtgaataaactggaagttgctttcttgaaaaaattatttctttctttgaatatctcggatgactgcccctagcactaacttatctgttgctgttgagttgcatattttataactatttttaagtctcccattataataactgattgaaaacccagtgagatctctaactttactgcttgtaatcctgcatatgcctccgccatgaatggggacgatattgcgaaatggagtactaattttaaggcaaaaaactcgtccatctccctccgtaccaccagacctgaaatcgatcttgaatatttgctatcgaatgctgcgtcaaaatagataattgctgtcgtatttcttgtgatctgtctctaacttctgttatcaacta

SEQ ID NO: 15332 - DNA, 582 bp, Gossypium hirsutum
  Clone ID: LIB3829-025-Q6-K6-A1
cttcaaaatcgaaaccttaagcctttccgttagatctgaaaaaagttccctcccggtggcgccgtcggggccgcaagccctctctcgcagaaaaccaccaccttcttcaagtccaggtgcgagcagagaagatcgaacagaaccttctagaaagagtccgacggttgattatccattttggcaacagaattggtttatcggattactattcctgatggcgatgggattcttaggtttcgctctcttcctctttatatctctcgatctcgatcaaggttccacttcctccgcatccgccgcctcctcctcctccacctcccaaaacgtcgagattacttatgggacggttctaaagctaatgcacgagaaaacgaaatttaggctgcattcacacgatgtgccgtacggttctggaagtggacagcaatctgttaccggctttcctaatgtagatgattccaacagctactggattgttaggcctgaacctgatacatctgctaaacaaggagacaccattcctagtggaacaattattaggttgcaacacatgagaactagaaaatggctgcatagccattt

SEQ ID NO: 15333 - DNA, 586 bp, Gossypium hirsutum
  unsure (1)..(586): unsure at all n locations; Clone ID: LIB3829-025-Q6-K6-A10
ctctgnatggggcaatccgagtaaatccgtggaatattgatgctgtggctgaagctatggattctgcactaattgtctccgagggctgaaaagcaactgcggcaccgaaaagcactatagatatgtgagtacgcatgatgtggcatattgggcacgcagctttttgcaggatctcgagagggcatgtggggatcatttgaggcggaggtgctggggaatcggttttggtttagggttccgagtaatagctttggatccgaattttaggaagctttctgttgagcatattgtttcagcttacaggagaaccaagaaccgagcaattcttttggattacgatggcaccttgatgccgaccggctcattaaatactactcccaatatagaggctgtcggaatcttgaacaatctgtgccaagatcccaagaaccttgttttccttgttagtggaaaagatagaaagattctaaccgaatggttttcctgttgcaaaaagcttggacttgcagcagagaacggttattttatcaggccgaaccatgattcagattgggaaacatgtgtctcgctgcctgactttgattgg

SEQ ID NO: 15334 - DNA, 589 bp, Gossypium hirsutum
  Clone ID: LIB3829-025-Q6-K6-A11
acatcatcacgcctatcacagctttgttgctgacggtcgtcacagtgtatatgaatgagtaaagaagaagctcgagaaacacgagcatggaagctcactgctttccaaaagctaaatttcaaagccgaggacgtgctggattgcttgcaggaagagaacattatagggaaaggtggagctgggatcgtgtatcgcggttccatgccagatggtctccttgttgcaattaaaaggttggtgggtcgtggaactggaagacgcgactacgggttctcggcggagattcaaactctgggccgaatcaagcaccggaacattgtgagactgttgggttacgtatcgaacaaggacacgaatctgttgctgtacgagtatatgcccaatgggagcttgggagaaatgttgcatgggtcaaagggtgctcatttgcaatgggagaggaggtattcaattgccgtggaggctgccaagggactgtgttatcttcaccatgattgctcgcccctgattatacatagggatgtgaagtccaacaatatactgctcgatgaatattacgaagctcatgttgctgatttcggcctggcta

SEQ ID NO: 15335 - DNA, 586 bp, Gossypium hirsutum
  unsure (1)..(586): unsure at all n locations; Clone ID: LIB3829-025-Q6-K6-A2
caaaagataactaanaattgaaggagaggaaatggctcaagactaatgtagttaatatggttgagattgcaaaggctttggctagacctgcttcttacactacaaagtattttggttgtgaactgggagctcaatccaagtttgatgagaagactggaacttcacacgtaaatggggcccatgacactgccaagcttgcagggcttcttgagaacttcattaagaagtatgttcaatgctatggttgtgggaaccctgaaacggagataattattaccaagatgcagatgattaccctgaaatgtgctgcatgtggatttgtttccgatgttgacatgcgagataaacttacgacattcattcttaaaaacccacctgaggcaaagaagtcaacgaaagacaagaaagcgatgaggagagctgaaaaggagagactcaaggagggtgaggctgctgatgaagagctgaagaagattaaaaaggagtcaaaaaaaaaaggttcctctactacttcaaaggttgttacttccaagggtgcagtaaccaagaagaaaagcaagcattctgatgaggatcattccccttc

SEQ ID NO: 15336 - DNA, 590 bp, Gossypium hirsutum
  unsure (1)..(590): unsure at all n locations; Clone ID: LIB3829-025-Q6-K6-A4
cgtggttccacagtccatccatatgtcgctactgggnaacaanaactctaaatttggtattaggaatgagaagctgcagtggtttctggatgctgtaaaggcacaccctaatgagctaaagcttgttggggcccattgtcatcttggttcaaccattaccaaggtggatatattcagggacgctgctgttctcatggtcaactacattgatgaaatccgtgcccaaggtttcgaggtagattatttaaacattggaggtggtttggggatagattactaccatagtggtgccgtccttcccacaccgagagatctcattgacactgtcagagaattggtcctctcaagaaaccttaaccttgtcattgaaccagggagatcactcattgcaaacacttgctgcttagtgaatcgtgtcactggagtcaaaactaatggaacaaaaaatttcattgtcattgatggcagtatggctgaacttatccgtcctagtctttatgacgcttaccaacacatagaactggtttctcctacacctcctgatgcagaggtctctacctttgatgttgtcggtcctgtctgtgaatctg

SEQ ID NO: 15337 - DNA, 582 bp, Gossypium hirsutum
  Clone ID: LIB3829-025-Q6-K6-A5
gtgtaaatcaatgaaaacatgttctttacattgttgcacaatatcaatgttgctgctattgaaacaaccttatggtcaattgaatggggcattgctgagcttgtgaaccatccagagatccagcagaaactccgcaacgaaatcgacaccgtactaggacccggtgtgcaggttaccgaacccgacacccataagcttccatatctgcaggcagtgatcaaggagacactcaggctccgaatggccatccctctactagtcccacacatgaacctccatgatgcaaagcttggtgggtatgacatccctgcagagagtaagatccttgtgaatgcatggtggttagccaacaacccggctcactggaagaacccagaagagttccggcccgaaaggtttttcgaggaggaatcgaaggtagaagcaaatgggaatgacttcaggtatcttccatttggtgttggaaggaggagctgtccagggattattttggcactgccaatcctagggatcacattgggacgtttggtgcagaattttgagctattgcctccaaagggcagtctaagcttgatacatcgg

SEQ ID NO: 15338 - DNA, 571 bp, Gossypium hirsutum
  unsure (1)..(571): unsure at all n locations; Clone ID: LIB3829-025-Q6-K6-A6
ctctcctctcatacttcactctaacgttccctttgaggttttagtgaaaacagcagnataaattaaggaatggagaccttcctatttacctcggagtctgtgaacgagggacatcccgacaagctgtgtgatcagatctctgatgcagtcctcgatgcctgtttggcacaggatcctgagagcaaggtggcttgcgagacctgcagcaagacaaacatggtgatggtgtttggtgagatcactaccaaagccgacgtagactacgagaagattgtgcgtgacacctgccgtggcatcggtttcacatctgacgatgtgggtctggatgccgacaactgcaaagtgctggttaacatagagcaacaaagccctgatattgcccaaggtgtccatggccatctcagtaagcgtcccgaggaaatcggtgctggtgaccagggccatatgtttggttacgccacagatgaaacccctgaactgatgcctttgacccatgttttggcaaccaggcttggtgctcgcctcactgaagttcgcaagaacggaacttgcccttggctcagacctgatg

SEQ ID NO: 15339 - DNA, 590 bp, Gossypium hirsutum
  Clone ID: LIB3829-025-Q6-K6-A7
cggccgcgtgggtttgggtccggcttcacggtccgtacctatgatagagaagctgttgagggccgggatgaacgttgctcgcttcaatttctctcatggcagtcatgagtatcatcaagagaccttggataatcttaggtctgctatgcacaacaccggcatcctttgcgctgtcatgcttgacaccaagggccctgagattcgaactggattcctgaaggatggaaaagctgttcagctgaaggaaggccaggaaattactgtaacaaccgattacgaaattaagggagatgagaagatgatctgcatgagctacaaaaagctggctgttgatctgaagcctgggaataccattttgtgtgcggatggtacaatcactctttcggtgttatcctgtgatcctgctgctgggactgtgagatgccgatgtgaaaacacagcgatgatcggtgagaggaaaaatgtcaaccttcctggtgtcgtggtggatcttcccacactcactgagaaggataaagaagacatcttgggatggggagttcccaacagtattgatatgattgctctttcctttgtacgcaaagggtctg

SEQ ID NO: 15340 - DNA, 605 bp, Gossypium hirsutum
  unsure (1)..(605): unsure at all n locations; Clone ID: LIB3829-025-Q6-K6-A8
ccgggtcgacccagcgttcggtcgtgtctttgactgttgagnaagcagtcacttcgtccagattatatcaagatgtttgtcttggatgaggctgatgagatgctttcccgtggttttaaggatcagatctatgatatcttccagctgcttccagccaagattcaggttggagtgttttctgccacaatgccgccggaggccctcgagattactaggaaatttatgaataagcctgtgagaattttggtaaagcgtgatgagctaaccctggagggtatcaagcagttttatgtgaatgttgaaaaggaagagtggaagcttgaaactctgtgtgatctttacgagaccctagccattacccagagtgtcatttttgtgaataccaggcgtaaggttgactggttaactgacaagatgcgaagccgtgaccacacagtgtctgccacccatggagacatggaccagaacactcgcgacgttatcatgcgtgaattccgctctggttcatctcgtgttctcatcaccactgatctccttgctcgaggtattgacgtgcagcaagtctctctagtcataaactatgatctgcctacacaaccagaaaa

SEQ ID NO: 15341 - DNA, 425 bp, Gossypium hirsutum
  unsure (1)..(425): unsure at all n locations; Clone ID: LIB3829-025-Q6-K6-A9
gggtcgacccagcgtttgctgaagcttacaaatttgcttacgtgcggcggaggatcttttcttctcccagttgacagttcgagaaacttatctcttgctgcagaacttcagcttccagagatatcttccgtagaagagagagatgaatatgtgaacaatctcttatttaagctaggcttggtcagctgtgccgggggagtgattggtgatgccaaagttcgtgggatcagtggtggtgataaagaaacgcttatcactaggttgcgaactaattgcaagtccatctgtcatatttgctgatgaacccacaactggacttgatgctttccaagctgagaaagtaatggaaactctccgcctgcttgcacaagatggcnntactgccatgtgcctcttgcctgcttccttggggggtcaccgtctgc

SEQ ID NO: 15342 - DNA, 597 bp, Gossypium hirsutum
  unsure (1)..(597): unsure at all n locations; Clone ID: LIB3829-025-Q6-K6-B1
ctgntttttcgcatttaaaaccaaagttaatcggtagcccaaccaaatcggacctcgtttctcggaccccctccatcatgcaaagccattaaaccaaacctttaaaatctccggcgtacgccctccccttcctccgccttccattatggctttctctgcttctccccactgcgcacctcccttacatcgtttcgcccttcgccgctctccgccgccacagccgccgctcgctttcatgcgctgccctttcttctcctcctcctcctttcgacccgtttacttctcccccgctcccaccctgaggatcatcgtctctgccaaatccaagaaaccttcctccgggagatcagccgattcgacgtcggcctccgccattgattttctcacattgtgtcacagtctcaagaccacaaaaaggaagggttggatcaatcacgggataaagggtcctgaatcaattgctgaccatatgtaccgcatggcgttgatggctttgatcgctggcgaccttcctggtgtgaatagagaaaggtgtattaagattgcaattgtccatgatattgcagaagctattgttggagatataacaccatcatg

SEQ ID NO: 15343 - DNA, 244 bp, Gossypium hirsutum
  Clone ID: LIB3829-025-Q6-K6-B10
gaaaaatctagcctgggttagggttttctaattatggattgctttagtttgtcttcaacgcgaaattacggttttgtttttttcaacattagcactatcttgatgattatctttgttataaaatatttgcaagctttcgagcttatcaatattgacaacatgtttcgcagtttatctactgttttctttttaatgttaaaagtaccaattcattgaattggcattgggctaaaaaaagacactg

SEQ ID NO: 15344 - DNA, 585 bp, Gossypium hirsutum
  Clone ID: LIB3829-025-Q6-K6-B11
gaaaaatgttaaataccttctgacttaagtttataccaaagatgattaagtggcagtaaagccggacgcgtgggcggacgcgtgggcggacgcgtgggttttttttttttttttttttttttttttttttttttttttttttttttttttttttttttttttttttttttttttttttttttttttttttttttttttttttttttttttattttattcaaattgttttataaagttatctatacttctgattttgtttttgtacttttttttttattaatttttttttttgagattaataagtttaaaaaaataaagtgcaaaattaaagtgaaaataaaaaacttcctttagggttttggcgccatttccaaacgtttttgattacattttcattgggatccctagattcttatttatatgggggtaatcggaaacctttaaaatggtttgcacggtaaaatattgcatttggagctgcttggggtctgggataccttcataaaaaataaaaatttggctgtcttgtgcaccgtgaaatgggggcggaaaacattttcattacccatggattttaaacctttt

SEQ ID NO: 15345 - DNA, 592 bp, Gossypium hirsutum
  unsure (1)..(592): unsure at all n locations; Clone ID: LIB3829-025-Q6-K6-B12
ggatttgtcaaagggtnagctctcggattgttgtcttagaggctgttattttcttgttagcccttatggttagggccgccaatgtacctgctgatcatgacagtgatgatgagttcattgcaccaaggcaacaaatcagacagtctttaatcaacaggccaccagttccagctacaggtgttcctgttactggcagccttgatcaacgacccagcagaaatgatgcttggagtgcacgaatgagggaaaagtatggtctggatacgtccgagttcacctacaacccttcggagtcaaacaggtaccagcagacagctccgcaaccagcagaaggaagcagccgttgcaccattatgtgatgatcatctggttggttggttggtttccgaaggaaaggttattgcattgtcgatggagtgacaacttcagatttttcagatgatggtcttattttgtttttgctgagtttgtacacaatctataggagctttatgtgttccccactcattcatttttcttgagaacatgtgtgtttgtttccaaacgcataaccaccattttgtgtgtaaaatttgactgctacgttagggtt

SEQ ID NO: 15346 - DNA, 591 bp, Gossypium hirsutum
  unsure (1)..(591): unsure at all n locations; Clone ID: LIB3829-025-Q6-K6-B2
ctgncagctacagccgcattaaatagtgaattcttcacgaccaagccttatgcttgtgatccttccagccttccaaaatacccaccttgcaaggagatggatgctaagctacgagatgaagaagctagaagattgcgagctgctggaagagctaatgctggagtgaagaaagctcgtccacgtgatcgagctgcgcgggcaattcctgctccagaagcaaatgctgagcttcaagccaaccttgatagacgacggttaataacacatgcaaatgccaaaagcaagagtgagaaatttccacctccacaccaagatggaactcttggttatcctttgggttctgcacatccgatagatcctggttatgatccacccgatgttccgtttagtacaagtttctcatattcaaataaagcaccaatccagacatggtctggccctttgatcgactcttctgccgttggtgctcctaggagaaagaagcacatgtcaggtgatggtcattcacattcaaagtcatgtaagaaagacaagaattcgactagaatataagagactacatataaaacgggctgctggaaagccaaaaca

SEQ ID NO: 15347 - DNA, 578 bp, Gossypium hirsutum
  Clone ID: LIB3829-025-Q6-K6-B4
ctgccatcattgggaacattttctctgcgatcttaaccttcttctttgcattagtgggcaccttgttaggggccatgacgggggctttgataggacaagaaacggagagtgggttcgttcgaggggctgcagttggggccatctctggtgcagttttctcaatcgaagtctttgagtcatctctagttctttggcaatccgacgaatccaggatcggatgcttactttacttgattgatgtcattgcaagccttctaagtgggaggcttgttcgtgagagaatcggtccagcgatgttgagtgcagtccaaagtcagatgggagctgctgaaacaacttttgaggatgtccagaacatatttgacattggtggttcaaaaggattggctggagatttggttgagaaaatcccaaagatcataatcacaaacaataacaatgcggatgcttccggggagaaagtttcctgctcagtttgtcttcaggactttcagctgggagaaacagttaggagcttgccgcagtgccaccacatgttccacctaccttgcatagataagtggcttgttagtcatggt

SEQ ID NO: 15348 - DNA, 595 bp, Gossypium hirsutum
  Clone ID: LIB3829-025-Q6-K6-B5
atcgccagttcccatagtaggatatctatcaatcaaagaactttggtttttgtttgtgttttaagtttcggatctttgcaataataaaggagtaaagaagaaatgctagcagttttcgacaaatcggttgccaagagcccagatgctcttaatgctccagataaccctcaggctgtttctgctctcaaaatggcttcttacctaatcactttgcctctgtttatcccggttctgtctccatcagtctcggctcttctggggttatggcttattctcttgaaaaacagaacccacttctccccagactgtttgcggttgtggatgacatattctgcttgtttcaaggccacattgagaatattgctgttcttaagcaacaatatggcttgaacaaaacagcaaatgaggggatcattgttattgaagcttaccgaaccctcagagacagaggtccttaccctccggatcaggttgtaagagatatccaggggaaatttgctttcattatctttgatagctcttcaaaagccacatttatagcttctgatgctgatggaagtgtacctttcttctggggaactgatgctgaaaacca

SEQ ID NO: 15349 - DNA, 584 bp, Gossypium hirsutum
  Clone ID: LIB3829-025-Q6-K6-B6
cttttcttttttctctctttcttcccctttcagctattgagatcgcgtttcactcagttctggaaaaaagaggggattattgagaggattaaagaaatcgaagccgagatggctcgaacccagaaaataaggccacagagtaccatcttggtcagctcaaagcaaagattgctaagctaaggacacaattactcgagccaccgaaaggttctagtggaggtggagacggttttgaagttacaaaatttggtcatggacgtgttgcactaataggatttccgagtgtggggaaatctacccttttgactatgttaactggaactcattcagaagctgcatcttatgagtttacaacacttacatgcattcctggtatcatacattacaatgatactaagattcaactgctcgatcttcctggaattattgaaggtgcttctgaaggcaaaggacgtgggaggcaggttattgctgttgccaagtcatcggatcttgtgcttatggttctggatgcctctaaaagtgagggtcatcgccaaatattaacaaaggaactggaagctgtgggattgcgtttaaacaag

SEQ ID NO: 15350 - DNA, 599 bp, Gossypium hirsutum
  unsure (1)..(599): unsure at all n locations; Clone ID: LIB3829-025-Q6-K6-B7
gnaaaaaagagcagctagaaaatgttgggcagngaaaacanatgcaacaattaaatcttgaagcagatttgcaaagaagggagtccgaagttgattcaagcacttggacatcagctggagggattcantgaaaagtctaagaaagctttaatggaccttcttcaccaaaaacttggtattcaatcgacaaggtcatcagaaggagattatcagtatcctacttcatcttccagaggcagggaaagcttttggcctgtttctgagccacaagcttccaattttccttttactcatttctcgaatcaagaagttcacgtaaacaactcatatctggaaggccctcaaaattccaattcaggtgccttattgcaagatcatttgtttggagttgctgctaatggtggtgtcaaccaggtggttaactgtgaacgattgcctcataaatccaatccgggttcatttgctgaagatcaatcattgttgttgggcgctgaagatctgtcttctagtagttatgcagatgctagcttagtgtcaaaatctgctgtgaataaggaattgggcgaactggaggggaaggagcagaaaatggattgaaa

SEQ ID NO: 15351 - DNA, 593 bp, Gossypium hirsutum
  unsure (1)..(593): unsure at all n locations; Clone ID: LIB3829-025-Q6-K6-B8
gttctagtacgcgagcgatctagaacaaagagatgcattcaaaactcatccaatgaatctactaagtgagaggacccttaaggtgctttttatggcaactataaaccacgcactgatattcccatggttgtcgacaaatatttgaacaaggagctggggctggatatggacaagttcatcacacactctgtgccttttgccgatattaacaaggcattcgactacatgctccagggtataggtctgagatgcatgattcatttggatgcttaaggaaatgttgctgctgtatatttgcccatccaaggatcaaaactctaatgttttgtcctactatgtgttatattatgtgcctacttaagctacctttcccggttatcaagagtgcctatatagaactctctctctctcaaaaaaaaaaaaaagagaaaagagttctttatatggagttttatattatatgctgagagaataaattatcttgtaaaagcttgctttgttaatgaaataaatttctattactatgattgtccaanaaaaaaaaaaaaaaaaaaaaaaaaaaaaaaaaaaaaaaaaaaaaaaaaaaggcggcc

SEQ ID NO: 15352 - DNA, 589 bp, Gossypium hirsutum
  unsure (1)..(589): unsure at all n locations; Clone ID: LIB3829-025-Q6-K6-B9
nttctttagttaaactaatccaataggaataagggtcccacaaattgtttcgtaagcttctgtaacacttcgaaattcagatgttcatcttctatggttgtgattttcgaaatttactgcctgattttcgttgcctagatttgttatttgtcccttttgcaggcttggctcatctccactctttaagtcctcgattggtacataaagatttcaaaacggcaaatgttcttgtagatgagaattttatagcaaaggttgcggatgcaggactgcgtaattttctgggaagaattgatgttgctggaccttcttctcaagtgacagcagatgagatatttcttgctcctgaggtgagggagtttagacgtttttccgaaaaaagtgatgtgtatagtttcggagtattccttttggagttagtaagtgggcgagaagcatcagaattaccatcttcaaactccacagagaaccttgtcgagtgggtgcaaaatagccacgattacagcaacatttccagcagcattgattcaaggttgggcagtagcttcacagctgaaggcatggaggaattcataaggttaaccgtccg

SEQ ID NO: 15353 - DNA, 598 bp, Gossypium hirsutum
  Clone ID: LIB3829-025-Q6-K6-C1
gtgcagggtggaagactccgtggacctttagggcaatttggtcgcctcaagcacatctacctgccttgagataagtatactggggaaccacgtggttttggattgtccagtatctagatcccgctgatgctgctgatgcaaaatatcatacggatggttatgttcttggcccagaacttactgttgcatttgctgaggaaaacaggaagaagccttcaaaaatgagggaaagagaacgcagaaggagtcggacagataggcactccccgcttcattattctcaatcaccgtgataggactgaagtttctcctgcagtccagattattattgtccttctaggaaaaggcattactcaaggttaatttcacccagagatgggagatatagagggtgatcctactcaaggtcgccttatagtaggagcaggtgtcaaagtctggactattctaggtgactaatttggtggtggatggattaatatgtgtatttctcaggagatatgtttctacgtaggtgcctggatgattagtttagccttgcttcttatataactcagaacaaagttggttgtttagttcctagtgctggttgtgggta

SEQ ID NO: 15354 - DNA, 605 bp, Gossypium hirsutum
  unsure (1)..(605): unsure at all n locations; Clone ID: LIB3829-025-Q6-K6-C10
atttcgctcaattactgcatttgntgaaaaagcgcctcggcaaagagtggaaatgagtggatgtaaaggacctgttacaacattcattgttgaacctttcatccctcacaatgaagagtactaccttaacatcgtctccgagcgtcttggttgtagcattagcttttcagagtgtggaggaattgaaattgaagagaactgggacaaggtaaaaaccatatttatcccaactgattcatctttcgcctcagaaactattgctccacttgttgcaacccttcccttggaggtcaaaggagaaattgagcagttcatcaaagtgatctttactctatttcaaggtatgccatatatcggttttgaatctagtactattcatatcaacatttggagcttaacattaactctttcatgtttcaaaatgccaaaatgttagatcttgactttactttccttgagatgaaccctttcacattggttgagggaaagccttatcctttggatatgagaggcgagcttgatgacactgcttctttcaagaacttcaagaagtggggtaatattgaatttccattgccttttggaagagtaatgagtgcaactga

SEQ ID NO: 15355 - DNA, 505 bp, Gossypium hirsutum
  unsure (1)..(505): unsure at all n locations; Clone ID: LIB3829-025-Q6-K6-C11
tttttctggncgcgtgggattttgcttgtgtttgttagtggttgagtgttgtcgggtcggggattagggcattgggcgctgccggcggtttctgtttggtaagataagaccggtcggttcgattggctgacgtggcgatcctggggtgtttgttgtttggcagggtataaagccttgctgtggtgtggggggtgagggtttaggtgtgcatcgtttgcgccacttatgagaccgttcatgatatgatgctcgctcgaatcttgtttatcatgcgctttgatttatcttcgctctctttatgttaaacccaatgctgcattctattcttacagtcctaaatagttgtcctttgttcatttgtgggtttaattaatgtgatttttttccctttcttttcttnatgagcgtttcggttcggttctgggattttcgtgtaatacatctccgcctttgtcttgaagactgtgtggaacaatgttctggtggcgtaggtttcttttatgat

SEQ ID NO: 15356 - DNA, 591 bp, Gossypium hirsutum
  Clone ID: LIB3829-025-Q6-K6-C12
acgtttgtactttgggtccggcttcacggtccgtacctatgatagagaagctgttgagggctgggatgaacgttgctcgcttcaatttctctcatggcagtcatgagtatcatcaagagaccttggataatcttaggtctgctatgcacaacaccggcatcctttgcgcggtcatgcttgacaccaagggccctgagattcgaactggattcctgaaggatggaaaagctgttcaactgaaggaaggccaggaaattaccgtaacaaccgattacgatattaagggatatgagaagatgatctccatgagctacaaaaagctggctgttgatctgaagcctgggaataccattttgtgtgcggatggtacaatcacactttcggtgttatcctgtgatcctgctgctgggactgtgagatgccgatgtgaaaacacagcgatgatcggtgagaggaaaaatgtcaaccttcctggtgtcgtggtggatcttcccacactcactgagaaggataaagaagacatcttgggatggggagttcccaacagtattgatatgattgctctttcctttgtacgcaaagggtctgatc

SEQ ID NO: 15357 - DNA, 574 bp, Gossypium hirsutum
  unsure (1)..(574): unsure at all n locations; Clone ID: LIB3829-025-Q6-K6-C2
gttcatcatcctcatcctgntcactgcaatattaagtgttggtttgacatatattcagctatccgtggnaatatcatcaatggtggtggagatctgtgttttgtgggggctcaaccgctatttttatgtttgcttattgtatctacttctacacaaggtcaagcatgagtggcttattgcagttctcatttgttttcggctacaatgcctgcatgtgctatgcattcttcttgatgcttggcacagtaggcttccgttcttcccttatgttcgttcgctacatttaccgagctgttaagagcgaatgactctgcctctgttcatgttcatgggaatggcataactttcttgtctttctgtcatggtgccatcactggaaccccttttcttgctaaccatattataaaaatcgagaaagaagaagacatggaaagattgtgaagattgtgatatgaacaaatatttcatctttggtatgagagaaaatcatggctaacgtttgatgcaaatttccctattgttccctctcttggttaagaattgtttgcagttcttcatttatctgtataacaat

SEQ ID NO: 15358 - DNA, 151 bp, Gossypium hirsutum
  Clone ID: LIB3829-025-Q6-K6-C4
gcggcgcccttttttttttttttttttttttagaatatgatttagttaaactgccttgaatattaaaaccaaaggtttaatgcatttcacaatgcttttgtcaatgttatatttgtatttttatgctataaataaacaatgtgatccccgc

SEQ ID NO: 15359 - DNA, 572 bp, Gossypium hirsutum
  Clone ID: LIB3829-025-Q6-K6-C5
ccccccccccctcttctcaaaaaaaaaaaatccctttcttacttgcttcttgggagaaactaaaccttgaaatctgctctcttaacactgtttttcgctcgaacagtgtggagaaccctgaaattcgctgtatttgtcttttcgcttgaaaccaatggtaagaagataagggggaaaaaccaatgggttttgcttcattcgccggacgagttttctttgcttctattttcatcctctccgcttggcaaatgttcaatgaatttggggttgatggcgggcctgcagcaaaggagttgataccaaagcttgatcttgctaagaaacatatatcatctcaactccatgtaaatttgccagatatcgaagttagacaattagtcgcaactgccatcattttgaaaggactaggtgctattctgtttgtatttggccatggattcggagccttactcctgtttgtctacttgttggttagcacaccacttctctatgacttctacaactatcgtcccaatgaaccccaatactctgttctgcttggtgatttcttgcagtgtgttgcgcaatgtggt

SEQ ID NO: 15360 - DNA, 590 bp, Gossypium hirsutum
  Clone ID: LIB3829-025-Q6-K6-C6
gcgtctcaaacggcttaaatagcagcataagggcaaggaggggattgatatcgcgaaacagcgccagtcccaagagcaggcgagtgagaaagaagatgtcgagggcacaggatggaatattgaagtacatgttgaagatgatggaagtttgcaaggctcaaggttttgtttacgggattattccggaaaagggaaagccggtaactggagcatctgacaatcttcgagaatggtggaaggataaagtccggtttgatcgtaatggtcctgctgctattgctaagtaccaggctgataatttgattcctggcaagaatgatggctgtaacaacattgggccaacgccacacaccttacaagaactccaagatacaactcttggttctcttttgtctgcactgatgcaacattgtgatccccctcagaggcggtttcctttggagaaaggtgttcccccaccatggtggcctactggcaacgaggaatggtggccacaactgggattgcccaaagatcaaggtcctcctccttataagaaacctcatgacttgaagaaggcatggaaagtgggggttctcacggcagtaatc

SEQ ID NO: 15361 - DNA, 605 bp, Gossypium hirsutum
  unsure (1)..(605): unsure at all n locations; Clone ID: LIB3829-025-Q6-K6-C7
gtgcagggtggnaaaatctccgtggacctttagggcaatttggtcgcctcaagcacatctacctgccttgagataagtatactggggaaccacgtggttttggattgtccagtatctagatcccgctgatgctgctgatgcaaaatatcatacggatggttatgttcttggcccagaacttactgttgcatttgctgaggaaaacaggaagaagccttcaaaaatgagggaaagagaacgcagaaggagtcggacagataggcactccccgcttcattattctcaatcaccgtgataggactgaagtttctcctgcagtccagattattattgtccttctaggaaaaggcattactcaaggttaatttcacccagagatgggagatatagagggtgatcctactcaaggtcgccttatagtaggagcaggtgtcaaagtctggactattctaggtgactaatttggtggtggatggattaatatgtgtatttctcaggagatatgtttctacgtaggtgcctggatgattagtttagccttgcttcttatataactcagaacaaagttggttgtttagttcctagtgctggttgtgggtaataat

SEQ ID NO: 15362 - DNA, 577 bp, Gossypium hirsutum
  Clone ID: LIB3829-025-Q6-K6-C8
cttctcctcctcctcctcctcctcctctctccctcccttctatcgaattctcaagcttccaatggagacgttagcttcttcttctctttgtacgacccacggcggcggcgctggtggcggattactcaatttttgtcgcggtggctccgtctctgttcttggcttcccccttcaacatctcaagattcaatcccttcccgattcgaagaaaaagcagggttttggggtcataaaagcttctgttgctaagacagaagttgcacttgtcagaataggcactagaggaagcccattagcactcgcgcaagctcacgagacacgtgacaagctcatggcttcccatccggaactagctgaagaaggggctatcaaaattgttgtaataaaaacaactggtgataaaatactgagtcagccacttgcagatattggtggaaagggcttgttcacaaaagaaatagatgaggctttgataaatggtgatattgacattgctgtccactcaatgaaagacgttcctacttatttaccggagaagacgattctaccatgcaaccttccgcgtgaggatgttcgt

SEQ ID NO: 15363 - DNA, 601 bp, Gossypium hirsutum
  unsure (1)..(601): unsure at all n locations; Clone ID: LIB3829-025-Q6-K6-C9
gtcgacccagcgttcgtcatattggnaaccccacctcagcccatgcttatggccatggctacaagcagtgatgctgcttgggtgccttgcactggctgcattggctgctcttctactgcttttgactttgctaaatccaccactttcaagacccttggctgccaagctgctcaatgcaagcaggtaccaaaccccacttgcggcggaagcgcgtgcgcattcaacatgacctacggtggctcaaccatagccggtaacctatcacaggacaccataaccttagccaccgacccaatcccaaactacactttcggttgcctccaaaagacagcaggcagctcagtgccaccacaaggtgtattgggcttgggccggggcccattatccctcctttcccaatcccaaaatttgtaccaatcaacattttcatattgcttgcctagcattaggtcacctaacttttctgggtcattgagacttggaccaagtgggcaacccgtgaggatcaaatacaccccgttgcttaagaaccctaggaggccctcactttattacgtcaatttgattggaattagggttggaagaaggattgttgatatcc

SEQ ID NO: 15364 - DNA, 594 bp, Gossypium hirsutum
  Clone ID: LIB3829-025-Q6-K6-D1
cagtaagccatggttaaacataacatgttgtgccaaatggccatttcaagaagcattggcagaactatgtgaaaacttggttcaatcagcctgcaaggaaggctagaagaagaattgcaaggcaaaagaaggccgtgaggatcttcccaaggccaactgctggacctctacgccctattgtccatggacagactttgaagtataacatgaagttgagagctggcaagggtttcacccttgaagagcttaaagctgcgggtatttcaaagaaacttgcacccaccatcggtatctcagttgatcaccgtcgtaagaaccgatctcttgaaggtcttcaagccaatgttcagaggcttaagacttacaaggccaaacttgttgtcttccctagacgtgctcgcaagtctaaggccggtgattctactgctgaggagcttgcaactgcaacccaaatgcaaggaccatacatgcctatttcccgtgagaagccttctgttgagctggtgaaggtcaccgaggagatgaagtcattcaaggcctacaacaagcttcgtgtcgaacgtacgaatgcacgacatatcggtgccagattga

SEQ ID NO: 15365 - DNA, 173 bp, Gossypium hirsutum
  unsure (1)..(173): unsure at all n locations; Clone ID: LIB3829-025-Q6-K6-D10
ttttttttttttttttttttttttttttttttttttttttttttttttttttttttttttttttttttttntttttttttnttttcaagggggggagctggggagaaaaggataaaatttaagggcaattctgggttctaacattggtttaataaaaaggcttggttctgggt

SEQ ID NO: 15366 - DNA, 613 bp, Gossypium hirsutum
  Clone ID: LIB3829-025-Q6-K6-D11
gcgttcgcccaatctcatatctctcctttgtttccccttttctctctcttttttcaaccctaaccctacctcaccaaccaggattcaacatgaagggaggaaaatctaagtcagatactaagagtgccaagctatccgtgaaatccaaagctggaaagaaatcggggaaggctgccaaggatccaaacaagccaaagaggcctgctagtgccttcttcgttttcatggaggagttccgtgagcaatacaagaaggatcaccctaaaaacaaatccgttgccgctgtcggcaaagctggtggagataaatggaagagcttgtctgaagctgaaaaagcaccttatgtagccaaggcagaaaagcgaaaggtcgagtatgaaaagaacatgaaggcctacaataagagacaggctgagggtcctaaagacgaagatgttgagtctgacaaatcagtgtctgaggtgaatgatgaggatgatgatgaagaaggcagcggagacgaagaagatgatgagtaggaaggtccgtggtggatagcataatcaatgtaggctgtgatagtgtttgatcaaaaccatatgttaatgctttcgatgtttccatgttattcttt

SEQ ID NO: 15367 - DNA, 593 bp, Gossypium hirsutum
  unsure (1)..(593): unsure at all n locations; Clone ID: LIB3829-025-Q6-K6-D12
tcggnacaatggtcatgataagcaagaagcgctgggtgttaaaagcataaattttggtactgacatccctgaagatcagaagtgcatggacaatgacgagcttagcgcgactgcatcgaaacccattggtgctggacaagctcaccatgctacctctaaaactggtgcaaatggcaccgcaaatgtcaactctgcactctcccctgctaccacaaagggatcagagccaaactctccaataactcctttgatcttgaggaagccattgcaaccttatgaccggaagcatcctgatgacgaagataactggtccctcacttcctcagctgcgtctgttcgaactgctagatcgagggtaactattggaagtgctcctacttttagaagtgctgaacgtgctgagaaacggagggagttttaccaaaagttggaggaaaaacaccgagctttggaggcggagagaagccagtttgaggcccggaccaaggaagagcaagaagcagcacttaagcagcttagaaagaacatggttgtcaaagcaaatccagtaccagatttctactatgaaggacctccacgaaaggttgaactga

SEQ ID NO: 15368 - DNA, 600 bp, Gossypium hirsutum
  Clone ID: LIB3829-025-Q6-K6-D2
aaaaaatcatacgcaatgagcactgctggtcaggttattcgttgcaaagctgcggtggcatgggaggcggggaagccactatcgatagaagaagtggaagtggcaccaccccaaaagctgaagtccgtattaagattctcttcactgctttatgtcacactgatgtatactactgggagtgtaagggttacactcctctgtttcctcgtatacttggtcatgaagcctcagggatcgtggagagtgtgggtgagggtgtgaatgatttgaaacctggagatcatgtgctccctatcttcaccggagaatgcaaagaatgtcgccactgtctgtcagaagaaagcaataacatgtgcgaactgcttaggatcaactgcgaccgaggtgttatgcttgctgatgggaaaaccagattttccatcaacggcaagcctatctaccactttgttggaacctcgacctttagccaatatactgtcgtccatgttggccaggttgccaagatcagtccaaccgcccctcttgataaagtctgtcccattagctgtgggatatgtacaggttttggggccactgtgaatgttgctaaacccaaaaagg

SEQ ID NO: 15369 - DNA, 508 bp, Gossypium hirsutum
  Clone ID: LIB3829-025-Q6-K6-D4
gcgtatctcgtcccccccaaaaaagagagatttacaatcgaaatacacagggctttatagccaaaatcccaaaaagacaaaacataaaaataaaaaatacaacttttctttgtttttctatttgctactgctgtggtttgtctgttcttcgcaggtacggggtgcgttggcatcgtacggaggctgtgctggcgcgggcgtggctgctggagggtacggaggcggtacggaggctggggctgctgcggcgcaaacagattgctagggttctgccctatttttgaatcttgggccacttgggctgatataatttggactagttttattagttttgggctatgggtcatgtaactgggctatggggtattgggtttgtgacttgggtcttggattttaattttgggtttagggtcatgtactaattttaggttttggactgcaatgatttggtttgtaaaaggatactaaaatgggctgtttgtgttttaaactttttgtttattgattt

SEQ ID NO: 15370 - DNA, 606 bp, Gossypium hirsutum
  unsure (1)..(606): unsure at all n locations; Clone ID: LIB3829-025-Q6-K6-D5
cggncgcgtgggattttggtgcctttgacatcttgtcttgaggcaattgtaacattgtgataaccggtaagttctaaaagcataaatttgaaagcagctgtagggttgaattaatgatctataagtggttaagctgataacttacaataattgctttcatttcctgtccaattcaattctttgcagagtggatgaatcaaatgctattaacacatcagtaacaaaaccatgtcccaaagatgcaatttgcgataaagagaaatatattaatgctaaggtatctagttggattttttctattgatgctcatacatcaattttcatttttcaccatccatgcattcttcctcatcttcttctttcttgcattgtgccatggggcagctggctgggtttttcattgagcaggaaacatctttttgcattgtcattgttgccctctaaattgatttgtggattgttttagctgcttatgggagaagggaataaatcactacaagatatgatatgttgttcttcatatagaagatcatttcctgttggtttctttgttctttatgccgtaagtaatattcaaggctgaaaagcaggtgcacttgcaccaca

SEQ ID NO: 15371 - DNA, 602 bp, Gossypium hirsutum
  Clone ID: LIB3829-025-Q6-K6-D6
gtcgacccagcgtccgcttttctttgtttatcagtcgaatcccagggtccctttaggctccgatctatcaccatgacaggggactaaaccatccgagccttggagtcccttttttagccttaagaccccctcgacagttcgattcctgcgaagaggaagggatctcgcggcgtgctttcaaggtaaggtctcctcttctttttggtttgatttccctttttaaaaaaaaaacaaaagcgaatggctaaaaggaaacgatcagtcgaagaactcagaagaaactcgagaagaaatgaccttttaggattttaatcgcctttttgtattgcgtattgagccttttgtattctctcttaacgtaaacttttacaattgattctcttcaggctttatagccaagagaagaagagaaaaaaaaataaaatatacaatttttccatttttttctgtctgttattttcttgtatgcatttgctgctgtggtttgtccctttcttcgcaggtacaggtgtgcgctcgggtacggggccgtgtgctggcgcgggcatgactgctgggcggtacggaggccagggctgaagcttggctggttgcggcgcatg

SEQ ID NO: 15372 - DNA, 606 bp, Gossypium hirsutum
  Clone ID: LIB3829-025-Q6-K6-D8
gccgccaccaccaccaccaccaccaccaccaccaacccattttctctttcatctccaccgctcaaaatgtctcttcaccatttgctctttcccattctaatactcgcattctccactgcttcttcattagctgccactgcaaaagaccaaactttaaacactcatcaagctgagttctttaaccccaagcttccacccagaatcctttcctcttccaaaaagttcgaaggctcatcggacattgtcgacctccgttaccacatgggtcccgtcctttcctcgtcgccaatcaatatctacctcatttggtacggtcgttggtctgtttcccaaaaactcctcatcaaagacttcataaactcaatttccccttccgcgacgccgtcgtttccgccgtctccttccgtttccgactggtggaaaaccgtctctctttacactgaccagactggagccaacgtttcgcggaccgtcgtcattgctaaagaacactccgatacgggttactcccacggttctcacctcacgcgcctttcagtccaacaagttatcgccaccgccgtcgaagccgctcctttccccgtcgaccaccgtaatgggatctac

SEQ ID NO: 15373 - DNA, 585 bp, Gossypium hirsutum
  Clone ID: LIB3829-025-Q6-K6-D9
acacttgacccaagtctcttcctccctgcgaacaccttccttttcttcttcgtcgtcatcgttgccatcttcacttggatcttcgtattatcaagacgattcccctctcagtccggtgactccgttccgatattcaggcgtgccattttcatgggaacgtttaccagggatccctaagatgctacaaagccacaagaagaaagattccatcaagttgctgccattgccaccaccaacctccaaggaagcttcattcaaccgaaagaaatcttcctcttccacttccaccgccgtcgcggagagtttccgaaaggacccatttttcacagcgttggtggaatgttccaaggatgatgaagatgatgatgaacgatcatcaagcaaattcaggagtggagctaagattacaaggagtatcagtgacaggttcgggttcattaatctttacacttgttgtaaaagaacatgtgcagtttcagaatcaatagtctatcttccaaggcgtagcagcagaacaggaacagctaagtatggcctaatcaatcgtcgctctcgttaactgctccgcaacaccccattaattct

SEQ ID NO: 15374 - DNA, 590 bp, Gossypium hirsutum
  unsure (1)..(590): unsure at all n locations; Clone ID: LIB3829-025-Q6-K6-E1
gtcctccaacanaagnacatccaaaatttaaacggaagggtgatgacttatttgtagaacatacgttgacacttactgaggcactttgtggcttccagtttatactgacccacctagatggcaggcaacttctcattaagacccatcctggtgaagtggttaagcctgatcaattcaaggccataaatgatgaagggatgcctatgtatcaaaggccattcatgaggggtaaactatacattcactttactgtcgattttcccgactccttggcccccgagcagtgcaaggcactcgaggctgtgctacctccgaggacctcagtccagctgacagacatggagctggatgagtgtgaggaaacaactctatatgatgtcaacatcgaggaagagatgcgtaggaagcaggcgcaagcagctcaagaggcttatgaggaagatgatgacatgcacggtggtgcccaaagagtgcaatgcgctcagcaatgatcggtggcaggcggtaaggaatggaatgtatgattgtttaacaaaaattatttgaaaataccattctggatatggttgtttgcttagaccatttctcct

SEQ ID NO: 15375 - DNA, 606 bp, Gossypium hirsutum
  unsure (1)..(606): unsure at all n locations; Clone ID: LIB3829-025-Q6-K6-E10
naaccaaccatnntagctactgccagnaaaatccaagcatcaatcttgcaaagcaaagcgtttgctaatggagggtctgatgcaggtgccttatgatgttacggttaggttcatgttgaccttcttggagcgcaatttgttgcctgatgctattatacggaggttgactcggcttctcctggctagtcgtcttcgttctggttataaaccctccactgaactccaactctctgatctccttcagtttgctcattccctaaaggagatgcctatagctatcaagacagacaagcctaaaactcaacattacgaactgccaacctctttcttcaagttggttcttgggaagaacttcaaatacagttgctgttacttttctgatgagtcgaaaactttggaggatgctgaggaagcaatgttggaactgtactgtgagagatcgcaattaaaagatggccaaacggttcttgatgtggggtgtggatggggttcactttctctatacattgcccgtaaataccccaattgcagggttacagggatttgcaattccaccactcagaaagcttttatagaggagcaataccaggatcggcaattgcaaaa

SEQ ID NO: 15376 - DNA, 224 bp, Gossypium hirsutum
  Clone ID: LIB3829-025-Q6-K6-E11
tcgaccctcacgaatacttcacgagcactgcaaagcttctccagtaataaaggtaagaatcgacttactgtaagagtttgaaaacggaaagtaacgagctttaaatactttagctaaaaggcaactgggacaattcagaatatgccaaacctgtttagctaacagagctttattgaatagaaacaaatccttgaaccccattccccctagccattttggtctac

SEQ ID NO: 15377 - DNA, 476 bp, Gossypium hirsutum
  Clone ID: LIB3829-025-Q6-K6-E12
gcgttcggttggtcatttgctgcagaaaacgtattaacaaatcggagcttgtggctcaacgactcatcaaacgatgggactttaatggaaagctaattcctcccctgtttgtttctagaagcagtggccatcagttgctgttgctaaatgcatgcgtgctattcagtggctgttctgctaaaattttgctgaagctatttttcgtcattgcacctaccagagaatcagttctgactggttggatagcagtgagcagtaatgttgctgtcatccatcatttcttttcataaactatccccggctacatcccagtgtctttgttctttgttccttggaattaaaaaactctgtaatctaacagtgtaacaataaattagctcatggaaaatgttgagattttcaaaaaaaaaaaaaaaaaaaaaaaaaaaaaaaaaaaaaaaaaaaaaaaaaaaaaaaaaaaataaaaaaaaaaacaa

SEQ ID NO: 15378 - DNA, 585 bp, Gossypium hirsutum
  Clone ID: LIB3829-025-Q6-K6-E2
gtccaccttgttcaatgtttgttaacatcttacgggatatctttaaagaagaacagtggaatatgttctggctttaattgatgaaatgcttacagccaatccgaaacgagccagactatttcatgacaagtctcttgctaatgaagatacttatgaacctttcctaaggttgctgtggaaaggcaactggttcatacaagaaaagagctgcaagatactggccttgatagtaagtgcaaggccaaaaacccaggatggcgttgttgcaaatggagaaaattcaaagaagaagggcactaccattaatgatgtactaaaggaattggttgaatggctgtgcacacagctgaagaagccttcccatcctacttgtggtattccaactgctattaactgccttgcatcattactgaaggaacctgtcgtcagatcttcctttgttcaagcagatggggtgaagttactgattcctttaattactccggcatctacccagcaatctatccagcttctctatgaaacatgcctctgcgtgtggctgttatcttattatgagccagcaatcgagtatttagcaacatctaa

SEQ ID NO: 15379 - DNA, 598 bp, Gossypium hirsutum
  unsure (1)..(598): unsure at all n locations; Clone ID: LIB3829-025-Q6-K6-E4
ttttgcacccttgncatccagtagctcgcaacataccgagccttaacgatccccgagctaactcaacaaatgtgggatgctagaaacagatgtgcgctgctgatccccgccacggaaggtacttgacggcgtcagctatgttcagaggcaagatgagcactaaagaagttgatgaacaaatgataaatgtgcagaacaagaactcatcgtatttcgtagagtggattcccaacaatgttaaatcaagtgtttgtgacatcccacccaccgggttaacaatgtcatcaacattcatggggaattcgacgtcgattcaagagatgttccggcgtgtttctgaacaattcaccgttatgttccgtaggaaggcatttttgcactggtatacaggggaaggaatggatgaaatggagtttacggaagcggaaagtaacatgaatgatctggtttcggagtatcagcaatatcaagatgctgttgcagatgacaatgatgaagattatgaagatgaggcaatggaaaattaaggtgattattattttttttaaaattcaacttaaaagaaaaaagaaaaaaaaagccaatggtgtttttgggg

SEQ ID NO: 15380 - DNA, 584 bp, Gossypium hirsutum
  unsure (1)..(584): unsure at all n locations; Clone ID: LIB3829-025-Q6-K6-E5
gngnaaaaagaccaatgttacccaaccgttagcgaggactccaaacgccgttcaaaagctaagaggaagctaagaggtctcatcgctgagaagaactgtgctccactcatgctccgtctagcgtggcactcagctggaacttttgatgtcaagaccaagaccggaggtccattcggaaccatgaagcaacctgctgagctcgctcatgctgctaacaacggtctcgatattgcagtcaggcttctcgagccgatcaaggagcagcttcctatcctttcatacgctgacttctatcagcttgctggtgttgttgctgttgagatcaccggtgggccggaaattccattccatcctggaagagaggacaagcctcacccaccacctgagggtcgtcttcccaatgctactgagggagctgatcacttgaggcaggtgtttagtaatcaaatgggtcttagcgaccaggacattgttgctctttctggtggccataccctgggaaggtgccacaaggagaggtctggatttgagggaccatggactaccaaccctcttatcttcgacaactcttacttcaaggagct

SEQ ID NO: 15381 - DNA, 572 bp, Gossypium hirsutum
  unsure (1)..(572): unsure at all n locations; Clone ID: LIB3829-025-Q6-K6-E6
gcgttcgccgatctcctgcttagagttagtttctcatatttatggggctacttgaccagttgtgggacgacaccgttgcgggtcctcgacccgataatggtctcggcaagctccgaaagcactccactttcactttccgctctaactcctccaaggaaaccgatggcgggagtgtgagatcgtacaatgatgagacgccgngaggaaacaacgaaagtgacacgtacgattatgatcgtaaaatcgccgcgttaccagagcggatcgcctccggtttcgccggccgaatcgactcctccggtatctcctttttctggaggaagcagagagtcgtatcggtttcggagaaggtcaacatcagatgcatacgagaaggggaaggagggtggaggtaggagccttgctcctccttacgacgtgtgagatgtgaacctctcctctcctctctgctgatcccccaattcgccgacaagtcaatattaatttgcatagtttctacgtttatacagctgaactttataatgttaattagagtttgcccactttgttttttttgcatgcatgtatgtatg

SEQ ID NO: 15382 - DNA, 604 bp, Gossypium hirsutum
  unsure (1)..(604): unsure at all n locations; Clone ID: LIB3829-025-Q6-K6-E7
cggnacgcgtggnngcattcccaccactttattnnaagcaataaaaaaaaagctataatggcaatcccattgtcctttctactgcttttccctctcttggctcccacatttgttttctcctcaccagttcaggaccccgagcaagtagtccaacaagtcaatgagagcataagaaatgctactatggcgaggaggagcttggggtttctctcatgtggaaccggcaatcccatcgatgattgctggcggtgcgaccatcattgggagaagaaccgtcagaagctagccgattgcgccattgggttcggcaagcatgccattggtgggagagatgggaaaatatatgtggtgactgaccctagtgaccatgaccctgttaatcctaaacctggaacccttcgatatgctgtcatccaagatgaacctttatggatcattttcgctcgtgacatgaccatcaagttgaaggaagaattgcttatgaactcgttcaagaccatcgacggccgaggcgtcagcgtccacatttccggtgggccatgcattactgttcagtacgtgaccaacatcataatccatgggatcaacattcatgattgcaaga

SEQ ID NO: 15383 - DNA, 571 bp, Gossypium hirsutum
  unsure (1)..(571): unsure at all n locations; Clone ID: LIB3829-025-Q6-K6-E8
gtgngcccatcatactgattgtactttcatcagggtttctggttctgaattagttcagaaatacattggtgaaggctctcgatggttagagagcttttcgtcatggccagggagcatgctccatcaatcatatttatggatgagatagacagtatcggatctgctcgaatggaatctggaagtggcaatggtgacagtgaggtgcagaggaccatgttggagcttctcaaccagctggatggatttgaagcatctaacaagatcaaggttctgatggctacaaatcgaattgatatcttggatcaagctcttcttaggccaggccgaattgacaggaagattgaatttccaaacccgaacgaggagtctcgtcaggacatcttaaaaatacattctagaagaatgaatttgatgcgggggattgacctaaagaagattgctgagaagatgaatggtgcttctggtgcggagcttaaggcggtttgcacagaagcagggatgtttgctttgagggaaaggagggtccacgtaacacaggaagattttgagatggcagtggcgaaagtgatga

SEQ ID NO: 15384 - DNA, 567 bp, Gossypium hirsutum
  Clone ID: LIB3829-025-Q6-K6-E9
gcaaattgctctatttaagggatctttggagaagcataggaggaaggttttggttacagcaggtgttttaggaagtgggtatttgttgtataaactatatgatgctcacaaacgtaggcttattgatttggaaaggcaactggctaacgatacgggaaaacgatgaattcattaaagctcaaattcaactccattttgagaacattcaaagaattgctgatacaacaacattacctcatgcaatgccctatttaagttgccggatagctgaagatttgaacctttcacatcttatggagagactagtgaaagggaaggatcagcccaacagtttgtcttcttcagagaaacttgagttatgggacaggctcaaaattttgagttttacaagattggtggtgtcaatatgggcagtaaccattcttagcttatatattagagttcaagtcaacattctaggaagacatttatatattgatactgcacgtggtcttggaagctcttatttacttgaggaagctgatctcattgacagggatgaccagcaaaaattcctggcaagtgctg

SEQ ID NO: 15385 - DNA, 607 bp, Gossypium hirsutum
  unsure (1)..(607): unsure at all n locations; Clone ID: LIB3829-025-Q6-K6-F1
gngaaggacatggnnatcatgcagcagnatgctcataggactgatttgatgaccataacacgtttcgtgttgaacgagcaatccaaatatcccgagtctcgtggtgatttcaccatcttgctcaatcacatcgttcttggttgcaagtttgtttgctcttctgttaacaaggctggtcttgccaaactcattggacttgctggggagatcaatattcagggtgaggagcaaaagaaactggatgtgctttcaaatgaagtctttatcaaggctttagtgagcagtggcagaacttgcatccttgtctcggaagaagatgaagatgcaattattgtggagccctcaaagtgtggaaggtactgtgtagttttcgatccactcgacggttcctccaacattgattgtggtgtttctattggaacaatttttgggatttacatggtgaaagatgaccatgaaccaacactagctgatgtgctgcaacctgggaagcaaatggtagctgctggctattgcatgtatggaagttcttgcacgcttgtgttgagcactgggaaaggagttaatggattcacccttgatccatctcttggcgagttcatactaa

SEQ ID NO: 15386 - DNA, 338 bp, Gossypium hirsutum
  Clone ID: LIB3829-025-Q6-K6-F10
tttctttttttttttcttaaaaaagaaaaaccaaaaccggttagaaacccaaaaacttaaaggaagggaaaaatattccaagggataagggcgaaaaaaccaaagggggaaaaatcggcccacaaagacctaaactaaaggggataaaaaaccacccattcagggggggccacaacaacagggacaaaacccaggggtagaccaaaaaagggaggcctttcagatgggaaacccgcagaactttgaaccccagcaaaccccctgttatttgggacaccctgggggaacaggggggcctgggattgactccttctggccgagatgggaatgagttgccc

SEQ ID NO: 15387 - DNA, 597 bp, Gossypium hirsutum
  unsure (1)..(597): unsure at all n locations; Clone ID: LIB3829-025-Q6-K6-F11
cttcattcaaccagtccttccggcaggaaccaaggnatagtgagtgcacataaatgatggaaaaaccgactgatttccagcctgtgcacacagaggataatgttccaggtgtattgtatgatttgctgcagaaagaggttatagctttgagaaaagctggtcacgagaaagatcataaggctgagggataaggatgatgcaattgagatgcttgctaagaaggtggaaacattgacaaaggcaatggaagttgaggctaaaaaaatgagaagagaagtagctgcaatggagaaagaggttgctgcaatgcgtgtggagaaagaacatgagaatagggtgaagcggtttggtaactccaagggatctgctgctcagctgcttactggaagaaatgcatctcgaagtgggttaacacgcagcactcaatgacaaaaaattttagttgcagcagcggcaaggagcaaatttgcataggtctcctgggtcctttgttttatttttctcttttatatatttttttacctctactttgatgattgattataagattataacttgcatgccgatgaacctatattcactgaaattggttagtga

SEQ ID NO: 15388 - DNA, 587 bp, Gossypium hirsutum
  Clone ID: LIB3829-025-Q6-K6-F12
gcgttcggtttttttataattactgatgtctccgccgctgcttggcgtggaggaggaagggattcagagcaatgttactttactcggttcttcaggctcatatggaaagtgtgtgccagaatagtgctgacttgaaggaacggaactacatgggcttgtctgattgttcttcagtggatagctctgttttttcccctccgtccgaggaaagaaaggctagtttgaatctaaaggcgactgagcttaggctcggacttcctggattgcagtcgcctgaaagaaatccagagctttgcttgttaagttcttctcagcttgatgagaagccgtttttccctttgcatccttcaagtgatggtcactgctttgcatcacagaagagtgttgtttcagggaataaaagagggttctctgatgcaatggatgggttctcagagggcaagtttctttctgattcaaaagttgatgttatgctgtcacctaggccttcttcaaacttcggggctcaaccaatgaaagctaaagaaatcacgagccaaaacgtggtgcatgacaggcctcatgctgctgacaagaccaggcctaat

SEQ ID NO: 15389 - DNA, 482 bp, Gossypium hirsutum
  unsure (1)..(482): unsure at all n locations; Clone ID: LIB3829-025-Q6-K6-F2
gtttccagtggcggttcttgttngagggtcccaatgggttcaaggatatcagcaagcaatccaaacgtggggaaagcctcaaccttttacatttgggttttgctctctgggatattttatcacctatacaaccaatcatcttatcaggcacttgatgagattagccctttgacattttcagttgggaacaccatgaagagaattgtggttatagtgtcaactgttttggtgtttaggaatccagtgaggcctttgaatgcacttggatctgggattgccattcttggaactttcttgtattctcaagcaacagctaagaaggtctctgctcctgaaaagaaaagctaaggattcagtaatctcttcaaagttttaaactttttttttggggtctttccttttgatcagatgatatttgcattttgttcctctttcccccttactataaatgtcaataaatgaccttaataatttgcttgctt

SEQ ID NO: 15390 - DNA, 602 bp, Gossypium hirsutum
  Clone ID: LIB3829-025-Q6-K6-F4
atttgagcttttttaaaaaggtgataaaagattgttttttcaatgaagaggagacaaagggtagtgattttaagcttagctcaccggcctgaggcggaggctgaggcggaggcgcaagctggtgcggcgacgagtatagtaactaagggaagtagtgagagtagtattaggaaagaagaagttaggatttttggggaagctaaaattgatgcaggaaatggtgggggttctttttatgggaatggtggcagtggtggcggtggtggaggagacggcggttgtgatggaggtgatggtgaaaagggtgatcctgaagaagaagaatttggaccattaatgaagtttgaggatgtaatgaaggagacaaatgctagaggagctactcttccttcagacatgatggaggctgcaaagactgttgggattcgtaaattgcttcttcttcgatatttagatttgcagggatcaagttggcctttaggatttgcaatgaggtcatggggaatgcttagaaaccgaatgttagccgacccgtcttttcttttcaaaatcggaactgagatagtgattgattcgtgttgtgctaccttcgcggaagttca

SEQ ID NO: 15391 - DNA, 617 bp, Gossypium hirsutum
  Clone ID: LIB3829-025-Q6-K6-F5
gggtcgacccagcgttcgcgccatgctcgcgagcctccgattctccggcaattaccgcgaataaaccgctaatatgcgcggcagccaaatgcaggtgtctcctgatcaagcacagttactagcgatgttagtacagattcttggggctgcaagatgtattgaacttggtgtttacactggatactcatcattggctattgcattggctttaccagaatcaggctgtttagttgcctgtgaaagggatgccaaatcccttgaggttgcaaaaaggtactatgaactagccggtgtttcgcacaaggtaagtgtgaaacatggactagctgcagatgtcttgaaatctatgatttctaatggtgagacttgcagctatgattttgcatttgttgatgccgagaagaggatgaatcaagaatattttgaactgctactgcagctggttcgggttgggggagtgatcgtgattgataatgtcctttggcatggcaaagttgctgacccattggtaaatgatgtaaagactgtcagcattcggaatttcaatagaaacctaatggcagatgatcgagtaagcatcagtttggtacctattggagatggaatgacaatatgcc

SEQ ID NO: 15392 - DNA, 575 bp, Gossypium hirsutum
  Clone ID: LIB3829-025-Q6-K6-F6
cttttctttgtttatcagtcgaatcccagggtccctttaggctccgatctatcaccatgacaggggactaaaccatccgagccttggagtcccttttttagccttaagaccccctcgacagttcgattcctgcgaagaggaagggatctcgcggcgtgctttcaaggtaaggtctcctcttctttttggtttgatttccctttttaaaaaaaaaacaaaagcgaatggctaaaaggaaacgatcagtcgaagaactcagaagaaactcgagaagaaatgaccttttaggattttaatcgcctttttgtattgcgtattgagccttttgtattctctcttaacgtaaacttttacaattgattctcttcaggctttatagccaagagaagaagagaaaaaaaaataaaatatacaatttttccatttttttctgtctgttattttcttgtatgcatttgctgctgtggtttgtccctttcttcgcaggtacaggtgtgcgctcgggtacggggccgtgtgctggcgcgggcatgactgctgggcggtacggaggccagggctgaagcttggctggt

SEQ ID NO: 15393 - DNA, 543 bp, Gossypium hirsutum
  unsure (1)..(543): unsure at all n locations; Clone ID: LIB3829-025-Q6-K6-F7
gtttctcaccatttcttttctcctgaagaggaagctcatccagttttttctcgtcttaagctttgagttcagactgacatcttgtctggataaactggaaaggctttcttgaaaaaatgtttctttctttggatatctcggatgaccgccccgatcgctgacttgtctattgttgttgagttgcatttttttataactgtttttgaatctcctattatggtaattgattgaaaacccagtgagatccctaactttactgcttgtaatcctgcatatgcctccgccatgaacggggacgatattgcggagtggagtactgattttaaggcaagaaactcatccatctcccccctcaccatcatacccgaagccgatcttgaatatttgttgtcaaaggctgcgtcaacatagatagttgctgtcgtacttcttgtgttctgtctctgacgtatgttatcacctaagttggttcctggagctccatatcatccatgcagcacaacaaanaagctgacacagttgactgttgcctatggtaaaaac

SEQ ID NO: 15394 - DNA, 596 bp, Gossypium hirsutum
  Clone ID: LIB3829-025-Q6-K6-F8
tgccctccgtgttggctctgatctctcagcattctacaattgtgacatgctagcataccaagacactctctacgtccactccaatcgtcaattttacgttaactgcctcgtagcaggaacagttgacttcatcttcggaaatgccgcagccgtgttccaaaactgcgacatccatgctcggaaaccaaactcagggcagaaaaacatggtgacagcccaaggcaggaccgaccctaaccaaaacacgggcattgtgatccagaaatgtaggataggtgccacttctgatttacagcctgttcgtaaaaacttcccaacatatcttggcaggccctggaaggagtactcgaggactgtggtaatgcaatcaacaatcagtgacgtgattcaacctgctggttggcacgagtggagcgggagtttcgccctgaaaacactgttttatgccgagtaccagaacaccggggctggtgcctcaacttctgcgagagtgaaatggggagggtacaaggtgatcactagtgcaagtgaagctcaggcttttactcctggcaggttcattgctggaggaagttggttaagctctacaggctttc

SEQ ID NO: 15395 - DNA, 575 bp, Gossypium hirsutum
  unsure (1)..(575): unsure at all n locations; Clone ID: LIB3829-025-Q6-K6-F9
cccagcgtccgttcgctctcttcctttggtactcaaaaaaaagcagagagggtttttcaaggaaagagtcgagttcttgagcgagatcggattgagttctggcaatttgggatgttttgtgaatggcacctgngaaaggaagtggccctgtggtttctactcttaatcctgcccataatcagaaaattgccgaagttagtgaggcttccatccaagactatgaggaagggatgcaagcttgcagtgaagcagcaaagatttggatgcaggttccagcccctaagagaggtgacatagttcgacaaataggtgatgcattgagatccaaactacagcagcttggccgccttgtttctcttgagatgggaaaaattcttcccgaaggaattggggaagttcaagaaatcattgacatgtgtgactttgctgtgggtttaagcaggcaattgaatgggtctgtaataccttcagaacgtccaaatcatatgatgttggagatgtggaatccccttggaattgttggtgtaattacggcatttaatttcccatgtgctgttcttggatggaatgcctgc

SEQ ID NO: 15396 - DNA, 597 bp, Gossypium hirsutum
  Clone ID: LIB3829-025-Q6-K6-G1
caaaacagctaatcaaattttcagtctaaaagcgaacaactcggcaccattagataccaacataccttcatggcccagaagattggttctgtaagctgccttaccttccatccctaccaagtgttactcgctgccggtgccgctgatgcctgcgtttcaatctatgccgatgacaactctcatacaagataaacgtataaatccttccacaatttcacaaaatctggaggcagatcacggtgaatgaaaccgtcttaggcacaaatttcatggaaggtcagtgatccaagttaatagttgcaaaaaattattcgagttcggatcattgttcgagtgtttcgggatatactgctgccagatttacaattccactatgggtgttattggaaattcaggggtataaacagagatatatattgatttcattagcctccggtcacacgtttatctttgcatatatatatacggggggtttggtgggggtggctttggcagataatatgttatatatatatatataggtgatgcattgtaaatattttcctttgttttttttttttcggttccctttatttcatggttttcaatgtgtcgaaa

SEQ ID NO: 15397 - DNA, 596 bp, Gossypium hirsutum
  unsure (1)..(596): unsure at all n locations; Clone ID: LIB3829-025-Q6-K6-G10
cggncgcgtgggtaaaattcgaaaccctaaaaaggttctcttcgaaatctccgtctcggaacaacctgtcttcacgcagaagtgaaaagagagtagccgttccagcaggactctttacgttggaaatcttcccggtgatgttcgcgagagggaagtggaagatttgttttataagtatggtcccatagctcaaattgacttgaagattccaccaaggcctccaggttatgcatttgttgagtttgaagaagctcgagatgctgaagatgccattcgtggtcgtgatggatatgactttggagggcatcgtttacgggttgaacttgctcatggtggtcgtgggcgctcttccatagatcgtcacagcagttatagtagtgggcgtggacgtggaccatccaggcgttctgaatatcgcgtgctagttactggattgccatcttctgcttcgtggcaggacctcaaggatcacatgcgtcgagcaggagatgtttgtttttctcaagttttccgtgatggtagtgggactacagggattgtggactacaccaactatgatgatatgaagtatgctattaagaaactcgatgactctg

SEQ ID NO: 15398 - DNA, 563 bp, Gossypium hirsutum
  Clone ID: LIB3829-025-Q6-K6-G11
acatttctacatcggagtaaatgctcaaattatttttgacaaaagatcaagatatacggctaggtgattttggtcttgctaaaatgttgacttctgatgaccttgcttcatctgttgtgggaactcctagttatatgtgccctgagctacttgctgatataccttatggttccaagtcagatatttggtctttaggatgctgcctgtatgaaatgactgctcacaaacctgcatttaaagcttttgatatgcgggctctgattaacaaaataaataggtctatagtggctcctttaccaaccatgtacaccagtgcatttcgaggacttataaaaagcatgctacgaaagaatcccgaacttagaccaagtgcttcagagttgctctctcatccacatcttcagccatatgttctcaaagttcatctgaaattaaatagcccacggtgcaacaatatacccactcggtggtctgatttaaattttgtaaagaaaactagatttgttgagcaagatgtcataggcagaaggcgatcattcagcaatgatagggctttgaacccc

SEQ ID NO: 15399 - DNA, 588 bp, Gossypium hirsutum
  Clone ID: LIB3829-025-Q6-K6-G12
tccgcccagcgtccgcggacgcgtgggagttgatgtttacgcattcggggtagtgttattagagttactaacaggtcaaagaatcagcgacttacaatattacaaaggccagaatttcttatcagactggttccatcctctagccgcattagattcgaatcaaatcatgacaaatatttatcaattgcttgatccatgtttagcctccggcaaagtccgggactatactcatcaactccaagccatggctcgagccactttcttgtgcctaagtcatgatccagaatcacgacacccgatgtcaaagatacttagaattcttgaaggaggagataccaacgttcctttgagtttagacctgaactcgatcggcaatcgaagcggccatttacgtggattgaaaactcaaacacaaccagaatctacgagacggcattctcgaaaactttcgcattgaccgaatcgtttcgaaagaccgaaaccgatgcttgtatagtttgagagtatcatcacattgattcctccttctccttttcatgtaatttcttcttcttttttacaatctactaccattatttgcttttattt

SEQ ID NO: 15400 - DNA, 297 bp, Gossypium hirsutum
  Clone ID: LIB3829-025-Q6-K6-G3
tgtaaggaaaaaaaaaaaaaagcttctctggtgtctaagggcacctactctggtaggcataacctattccctctcttcttttagctttctgctgactaatcaccacacaacgtgaggggtaatgaaccctgcacgctgtacgaacctttcaataaaaatatattatgattgtgcagaatatacggtgggacctgcacatctcacaaatgaacctcgtgagtcgagaacgatctgtatcaaataacctgtcatttgagactgtaacttatattacaactttgaatcactacatctttc

SEQ ID NO: 15401 - DNA, 601 bp, Gossypium hirsutum
  unsure (1)..(601): unsure at all n locations; Clone ID: LIB3829-025-Q6-K6-G4
cgttaacactacagtcaggnaccctgncaaccanaagaagatctctcaccttgtaacactacaagagttgggagacttgaagatctttcaggcggatttaactgatgaagggagctttgatgcccctattgctggttgtgaccttgtcttccatgttgcgacacccgttaactttgcttctgaagatccagagaatgacatgatcaaaccagcgactcaaggagtggtgaacgttttgaaagcttgtgccaaagcaaaaacagttaaacgagtcgtcttgacatcatctgccgcagctgtgtctatcaacacactggatgggacagatctcgtcatgacagagaaagactggaccgatatcgagttcttatcatcagcaaagccaccaacttgggggtaccctgcatccaagacgttggctgaaaaggcagcttggaaatttgctgaagaaaacaacattgatctcattacagttatcccttctctcatgactggtccttcccttaccccaattgtccccagcagcataggccttgctacatctttgatttcaggcaatgaattcctcataaatgctttgaaaggaatgcagatgctgtca

SEQ ID NO: 15402 - DNA, 565 bp, Gossypium hirsutum
  unsure (1)..(565): unsure at all n locations; Clone ID: LIB3829-025-Q6-K6-G5
ggnaggcttatatgcaaacttgatattttcttttcatatgaagtttaagatactgacgttacttatctaactttctcaacattgttttacttgttgcaagggtatctcaagtcactcgacattgctttctggcattctaatgtttattatcacctacgcgtcacccatgtttattcttcttagccttgtaatatacatctctatgaaaaacatggcccatcttgtaattcctgagaaagcaggtcctggagatcatctcatgatgatgctgggtttttcatgcctcataccgctggtcataaattcaattctcttgacttcatacacggttgtattgctgttaatgcagaatcacttatttgtttggagtgttttctcacccaagtaagttctgagtctcatcgaaaaatcctaggtgactgatatgcgcctatgcatgctcgtatattgcactgatgacaaattgcatgaataactggtgttcttgttcttccaaaacatcgtacctatttcatgaaaaaaacctcaaagtatttgattcatcagaattccaattaccttgtgg

SEQ ID NO: 15403 - DNA, 571 bp, Gossypium hirsutum
  unsure (1)..(571): unsure at all n locations; Clone ID: LIB3829-025-Q6-K6-G6
gngccaggctccngaccgacatgaaaggtctcggaaccaacagccacgtcgtccaggagtcaacccaaccggcgactctctcttctgattacgctccctacccgaaattagaccccaggacgtcgctcctccaccggaaaattggaccaccgtttccatggcttcgcaatcggatcccagtccggaccccgtcccgatctccagcagcgctgctaccaccatgcctgctgagtccaacccgtacgtttctccggcgccagttcaatcttcttccgtcaagaataagatggaatcagtgaaagacgtgttggggaaatggggaaagaaagcggcggacgacactaagaaggcgaaagagatagctgagaacatgtggcaacacttgaaaactgggccgagttttgctgacgctgctgtaggaagaattgctcagacaaccaaagttattgctgatggcggttatgagaagatctttcggacaacatttgagactgttcctgaggaactgcttctgaagacatatgcttgctacttgtccacctccgctggtcctgttattggagttttatat

SEQ ID NO: 15404 - DNA, 598 bp, Gossypium hirsutum
  unsure (1)..(598): unsure at all n locations; Clone ID: LIB3829-025-Q6-K6-G7
ctttctacccactctcccgcaagccccaactcttttttatttcttgtttcatataatttcgttgctgatctaaaaggcgggtcggggcaaaactctcggatccggagcctcgaagaaggcgacatcgaggagtagcaaagctgggcttcaatttccggtgggtcgtatagctcggttccttaaggctgggaaatatgctgaacgagtcggcgccggagctccggtttaccttgccgctgttcttgaatatcttgccgctgaggttcttgagcttgccggaaatgcagcgagagacaacaagaaaacccgaattgtgccacgccatattcagctagccgtaaggaacgatgaagagctaagcaaattacttggagatgtcacgattgccaacggtggtgtgatgcccaacatccacaatctcctccttcctaagaaagctggaacttcctcaaaggcatctggaggtgatgaagattagattatgtcaacagtttagactcataaaaccctaagggaatcccctaatttatctccctctgtttacgtgattcttagattgaaaccatcatgggtattagctntgaatgttgtttcactt

SEQ ID NO: 15405 - DNA, 567 bp, Gossypium hirsutum
  unsure (1)..(567): unsure at all n locations; Clone ID: LIB3829-025-Q6-K6-G8
tccggccccttttacaggtgaaaataaggctttattgtcctttacatattcagggnaaagaaatctaagatttctttctattctatgtctcctgatgtgctgtgattttcttgccattctttgctctgtttttttcgctatctgctgtctgtttcctttttgtgaaggcaatcgagcgagggatccggcagtgaccatgctggtgtagacgcgtgcactgatcacggcgctgatggagccttggtgacggtcatgacattcatgacgtaatttggggccagaccaagggacgaccgatgatcggggcgttgatgagcattgaaggcccttgggacaactcattaaacggtggcctcgatttggggattggcagacactccctgaagctttcagaaacgtttgcggcgtcacagtattcaggaaaccctagggtttccctgtttctcttaagtctgttaggccttttgggctgttttgttttgggccaaggtctgtaatgtaatgggttaggtctgacttaggctagcagggataatgagtctaacgggctgctggatgtaacgggtc

SEQ ID NO: 15406 - DNA, 576 bp, Gossypium hirsutum
  Clone ID: LIB3829-025-Q6-K6-G9
gctgactaccagctcaccaagcttttaggcctccgcccctccgttaagcgcctcatgatgtaccaacaaggttgcttcgcaggggggacggtgctccgagtggctaaggacttagctgagaacaacaaagtgctcgtgtacttgttgtgtgctcggagattactgctgttacctttcgtggacctagtgacactcacctagacagtcttgtgggccaagcattgtttggtgatggtgccgcagctgttataatcggggcagaccccgtgcccgaaatcgagaagcccatgtttgaactagtctcagcagcccaaacgatcttgccagatagtgatggtgcgattgatggtcaccttcgtgaagttggtcttacatttcaccttcttaaggatgttccggggcttatttcgaagaatatagaaaagagcctggtagaagcatttcaaccattgggcatatccgattggaactcccttttttggattgctcatcctggtggtccagcaatattagatcaagtagaagccaaattagcactgaagccagagaagctacgagccacaaggcacgttcttt

SEQ ID NO: 15407 - DNA, 603 bp, Gossypium hirsutum
  unsure (1)..(603): unsure at all n locations; Clone ID: LIB3829-025-Q6-K6-H1
gnaaaaaagagnaacacctaagcagtccaaatacgagatgccaccacctccttcccttcaagctggtccagtgaagaaaggtcatcatatgggcgattatatcccacaggaagagcttgaaaagtttatggctgcctgcaatgatgctgctgcacaaaaagctgcaaaggagactgcccagaagacaaagattcaatctgataatgttgggcataaactcttatcgaaaatgggttggaaagaaggtgatggtttagggagttccaggaaaggcattgcagatccaatcatggctggtgatgtgaagatgaacaatttgggggtcggtgctcataatcctggagaagtgacgccagatgatgatatatacgagcaatacaagaagcgaatgatgcttggctatcgatacagacccaatcccctgaacaatcctcgaaaagcatactattgagaacacagttgtggaagaaatctactatgtgtagggtgggtggctggttggaggaataactctaaagagttgaaggatgcttattgcatatcatatacatacactttatatttatgtatatatttgtgtttatgactgaggttcctttcttt

SEQ ID NO: 15408 - DNA, 608 bp, Gossypium hirsutum
  Clone ID: LIB3829-025-Q6-K6-H10
aaaaacaaacttattaagttcttcgcagattttaaggtgttttagtgttcttttttgtttaggattctgggttttgtttattttttgtaatggaagtggaaagctgtgaaattggtggtggtggtggtggtggttcagccaccaaaaccggtggtttaagcggcggtgtgagagctgagatcgatacttcggcgccgtttgaatcagttaaagaggctgcttctcgatttggtggaatcggttattggaaaccctctcaacctaagctcatgtctgaaactgagcatgatggggaagaagttgacattgcgaaattggaggaacaagcggcgaaattggagaaagatctcattgttaaagaaagagaaacattggatgtgctgaaagaactcgaaacaacgaaattaaccgtcgaagaactaaaattaaagctgaagaaagaagcatccgaagtggatgtgaagaacacggatgcagagaaagagaatcgtcgtggtgaccatccgaacttggtgggaagtttaagcccctgtccttcggcagctccaggtttaatcttgatggagttgaaacaggcgaaactgaacctttcgaggacaactaatgat

SEQ ID NO: 15409 - DNA, 552 bp, Gossypium hirsutum
  Clone ID: LIB3829-025-Q6-K6-H11
tttttcttaatgagaaccgggggtgggggggctttccatgttttcaacttttggttctctgtgtcagtccttttttgcttccattttattgtaacttttctggtttaatgaaagggtaatggaggtaaagggtaatctaatccaattgtaacttgtttaaatttttgcgtttgatgcgaactctgttcaaagccctttcaaaagcttgaactttgagactgttgagtatagaaacacttgatgatcttcaaagcttgaaactttaagcctgctaatgctcttcagcttctgggtctttccaaaatgtcatcatttgagatgtcccatatcgatttagagcaaggaactcaccgccggaacgagagcgaagtcagcgccggcgaagctagcgtgtgcttctccgacgccgacgagggctcttgctactctcagttttattccaccacgggtggttcttacgatgagtacagcttcggttgcgagattggtggcgattcggattccaggagggtgtcttcggcctcggattgctcggtggaggtgcgggctcca

SEQ ID NO: 15410 - DNA, 580 bp, Gossypium hirsutum
  Clone ID: LIB3829-025-Q6-K6-H12
gcgttcgcccagcgtccgggaattttagacccgagagtttctcggtgagggtgggtttggttgtgtcttcaaggttggattgaggagaacggaactgctcctgtgaaacccggtactggacttactgttgctgtcaaaacactaaacattgagggacttcagggtcacaaagagtggctggccgaagtggattttcttgggaacctccttcatcccaatttggttaaattggttggttactgcatcgaggatgatcacaggttactggtatacgagttcatgccacgaggaagtttggagaaccaccttttccgaaggtccttgccacttccttggtctattagaatgaaaatcgcacttggggctgcaaagggtctcgcctttcttcatgaagaagccgaaagaccagtgatatatagagattttaaaacatctaatatcctgttagatgcggattacaatgccaagctctctgattttggactcgccaaagatggtccggaaggagataaaactcatgtatctactcgagttatgggaacatatggatatgctgcaccagaatatgtaatgactggac

SEQ ID NO: 15411 - DNA, 596 bp, Gossypium hirsutum
  Clone ID: LIB3829-025-Q6-K6-H4
gcaaacaaacaaacaaaaaagaaagggcaaaaaaggctgtgcaattcaatccctggcttctcaaactaagaaactcccttcatatgctcttccacccatggcaagtcttagatctcccaaggtttctatggtctccactcttccacctcgctccaaagggttgaagatctgaaacggcctttcatggctccaaagctggtacaccagtcttcccacaccatgccacctgagaagattgagatctttaaatctttggatgattgggctagggataacattctgattcatcttaaacaagttgataaatgttggcaacccaaggattttcttcccgatccttcgtccgatggatttgaagatcaagttagagaacttagagaacgggcaaaggagattccggatgagtactttgtcgtgttggttggtgatatgatcacggaggaagcccttccaacttaccaaactatgcttaataccttggatggaactcgtgatgaaactggtgctagccctacttcttgggcaacttggaccagggcctggactgccgaagaaacagacacactgatctacttaataagtatctctacttgtgt

SEQ ID NO: 15412 - DNA, 567 bp, Gossypium hirsutum
  unsure (1)..(567): unsure at all n locations; Clone ID: LIB3829-025-Q6-K6-H6
cggtcgcgtgggcggncgcgtgggtgaatctctataaaaaaaactatacatcttctcataatagaaacagctccatttctcctcagtttccctacgttcttcattccccttaccaaaccagctcgcctatctatggctactccactaaggagcaacagcaggctgtccactgccatggagaggaccggccagtgggttttctcccaagagattcctactgatgttattgtcgaagttggtgaagccaatttcaatctccacaagttcatgctggtggcaaagagcaattacataaggaagttgataatggaaacaaatgaagcggatttgacaagaatcaacctgtctgaaatccccggaggccctgagatcttcgagaaagcagccaagttctgctacggcgttaatttcgagattacagtgcataacgtggcggctctccgatgtgctgccgagtatctccaaatgacggataaatactgcgacaacaacctggcagggcgcaccgaagatttcctctcacaggttgccctgtctagcctttctggcgccgtcgtcgttctcaaa

SEQ ID NO: 15413 - DNA, 614 bp, Gossypium hirsutum
  unsure (1)..(614): unsure at all n locations; Clone ID: LIB3829-025-Q6-K6-H7
naggattacatgaacatcgatcgtctagcaatcatttgggtaaaaagcaggtccaatatatacgtattcaacagggacaaggcagcacttgtatgtgaaccaggcagagcttgtgaaagaaatgaaccaatgcattagcttggatttaggtaagccctcatacataacaaagagactggcacctatgctcggcaatggcattttgagatccaatggccccctatgggcacagcagaggaaaataattgcccccgagttcttcatggacaaggtcaaggtaatggtggagctaatggtggagtccatgcaacctcttgtaagaaagtgggaggacagcattgaggcccaaagtggtgtgatggcagacattagagtggatgaggatttgaggggcttcacagcagatgtcatcgctagagcttgttttgggagctcttattctaaaggcagagagattttttccaagcttaggaaacttcaaacagctatttccaagcaaagctttcttttcggagttccaggctatggacttctgccaatgaagaagcaaaatgagatcttgagtttggagagagagatagagtccctaatctgggaaacagtgaaagagcggg

SEQ ID NO: 15414 - DNA, 527 bp, Gossypium hirsutum
  Clone ID: LIB3829-025-Q6-K6-H8
caaacaatacccttttctttctatatatgaattaagtctttttttggttcatttcttcttcctttctgtcgataccctttctttatagtatctcccaataaaaaaatgaagggaattgagtaggtgtttttatctctaagactttgaagcataaaaatgatgatgatgacaatggaaggaatgatggatcagggtgtattggacgatataataagaaggttgttggaaggtaaaggaagcaaacaggttcagctttctgaaggagagatccgtcagctttgtgttaatgctcgtcaaatcttcctttcacagcctaacctacttcagattcatgcccccattagaatctgtggtgatattcatggacaataccaagatctcttaagactctttgagtttggtggctatcctcctgcgacaaactacctgttccttggggactatgtagatcgaggcaagcaaagtttggagacgatttgtttgcttttggcctataagatacggtatcccgacaaagtttttctctt

SEQ ID NO: 15415 - DNA, 572 bp, Gossypium hirsutum
  unsure (1)..(572): unsure at all n locations; Clone ID: LIB3829-025-Q6-K6-H9
ggctttgggtgtttntcgattcaatgcaacctaatgattaggtaataagtgcttgtttgtgtattgaattttgggggctgttttaattcaaacagaaaagaagctttatcacccatagagctttttgtgacgccttagctgaagaaagtgcaagactcacttcagttgcagccacaagcctaaatttcagaaacgatactgtgaatctgcctcatggatttgctggccgtggagttcaagatgttgctggcattcctcaatttggttcgggttttgctcaagatttcagtgggatgcctgcaccaggtaggtaactgcacagtattaatttgtttctcatctatctatctatttatctatctatctatatattgtgacaaattatgtggggggttattcgttgttattgaatttgtcactcaggtttgcctgagatggttcgaatggctccagccaatctctttggctcttcttcacactttcctggatttgaaaacggcggtgcaacttcatcaaattccaataatctctccttatcgcaactgccacaagggttaaaagaagaaggtcga

SEQ ID NO: 15416 - DNA, 93 bp, Gossypium hirsutum
  Clone ID: LIB3829-026-Q6-K6-A1
gcgttcggttttgggttccggctttgatgttccaatctatgtttggacaatcttatgtgttttgtcttggaaattttaagaacactgttttag

SEQ ID NO: 15417 - DNA, 593 bp, Gossypium hirsutum
  unsure (1)..(593): unsure at all n locations; Clone ID: LIB3829-026-Q6-K6-A10
ggnactcatcttccagcattgctgaggtgaagaagaaaagcatgcacctaagagaccttctgtgaaatcattgttcgacactcctggacctcctgtcccccacaaagggagctttctcaacctcttgccaactcaattagaggaacctgaaagcccggtgtctgaacatcaatctattagagccacacaatatcctcggaaacctttgcacagatagtagaatgatgcaatatgtaggtaaatcgttcttatgcgaattggtaatgaaaatctttcccaacattgcaaatcggcaatgagtcatcatatgctttagaaagatgactcgtatacattagaaagattcctcttcgtttaagcatgtttcgaaatagcatatatggccattcatggtacatcatatatataaggagtttactttcttcttttgaatcttttcaagctgtgccttcggattcgaatcattaccatgtttatattttcctgttgaagaaagatgaaggcagaagttgaactgataagtgtagtacaggtttgtgcattattttcccgtcacgccagtagctgtagaaacaaattatacaaatataatc

SEQ ID NO: 15418 - DNA, 603 bp, Gossypium hirsutum
  unsure (1)..(603): unsure at all n locations; Clone ID: LIB3829-026-Q6-K6-A11
gcgttcggcttgctgntaaggtgatacttagtactgctgctacaaaaatcagagatggtgatgttcttctgacatatggatcatcatgtgttgttgaaatgattcttttgtatgcccatgagcttgggaaacaatttcgtgttgtggtggtagactcgcatccgatgcttgaaggccaaaagctacttcgtaggctggtggtaaagggccttagttgtacttatactcaattaaatgctatttcttatgtcatgcacaaagtcactcgagtttttcttggggcttcctctatattttctaatgggactgtatattcgacggttggaactgcatctgttgctatggttgctcatgcatttcgtgttccagttttggtctgctgtgaagcatataaatttcatgaaagggtgcaacttgattcaatctgctttaatgagttaggtgatccagatgccatatcaaaggtcccaggaagagtggatgtgaattatttggataacttgactgataaacagaaggaaaaccttgaacttcttaatttaaaatatgatgccactccttcagattacatctcagtgattgtcacagattatggcatgatcc

SEQ ID NO: 15419 - DNA, 591 bp, Gossypium hirsutum
  Clone ID: LIB3829-026-Q6-K6-A12
ctcattcttttcccgggacccatacaaactctaagaacagaaatggcaccaaagctgagaagaagccagctgagaagaagccagcggaggagaagaagacggtagctgagaaagcccccgctgagaagaagccaaaggcaggcaaaaagcttcccaaggaaggcggagctgcggccggagacaagaagaagaagagggtcaagaagagtactgagacctacaagatctacatcttcaaggtcttgaagcaagttcaccctgatatcggtatctcaagcaaggctatgggaatcatgaacagcttcatcaatgatatctttgaaaagcttgcccaagaatcgtctaggctcgcaaggtacaacaagaagcctaccatcacttccagggaaatccagaccgctgttaggcttgtacttcccggtgagcttgcgaaacacgccgtttctgaagggaccaaggccgttaccaagtttacatcttcttgaaaaagtgatttgtggttagggttagggttttcattttaaaagtagatcgcgttgtttttctcttccgttgtgaatcattctgctcttctgttatatgattccgtgt

SEQ ID NO: 15420 - DNA, 589 bp, Gossypium hirsutum
  unsure (1)..(589): unsure at all n locations; Clone ID: LIB3829-026-Q6-K6-A4
gnacgctctgnttctccatctgtcggttggggtggcccaggagggtacgtttaccagaaggcttacctcgagtttttctgctcactggataaattagatgcactagtngaaaaattgcaattccttttcatcattgacctatgttgctgtcaacaaaaggggaatttgttatcaaacattggcctcacagatgtgaatgcagtaacttggggagccttccctgctaaagaaataatccaaccaactgtggtggatcctgccagttttgtggtgtggaaggacgaagcatttgaaatctggtctcgatcatggtccaccttgtacccagatggtgatccttctaagaatttgctcgaagagattcagagcagctactatttggtgagcttggtagataacaattacatggatggtaatatttttggtgtttttgaagatctttgaagatgagatttgagatattattatgctgcagtgcagtgttccacttatgcttatgatttaatgtttatggtgtctttctcctttattattgtctcttcgtggttgaattttcaattgtaactttatttgtaataatgactatata

SEQ ID NO: 15421 - DNA, 591 bp, Gossypium hirsutum
  unsure (1)..(591): unsure at all n locations; Clone ID: LIB3829-026-Q6-K6-A5
naattgatagcatgaagctaagcagaacactggagacatgccagtaagcagcagaatgttgacaacaacagcagacatgttgttcatgatgtattgcttcggaaagggaaggatgatgatgataccgataagcatctagctcgaagaataatgcagaataaacaatttagtgtatctggtcaggctgatgatgaatatgactatgaagatggtccaagcagaaaaccatggaagaagggtggggaaagcaattgggtctctggaaataatcatttggctaagcgtatattgactcagcaagagcgctgtcttttctgctttgaaaaccctaacagaccaaaacatcttgttgttgctatagcaaatttcacatacttgatgctaccacaatggcagcctgttgtgccaggtcactgctgtatcttaccaatgcagcatgagccagccacaagaacaattgaaaataatgtgtgggatgaaatccgcaactttaagaaatgcttaattatgatgtttgccaagcaagataaggagatggtgttcttggaaactgtgatgggattggcacaacagcgtcgccattgtctgatt

SEQ ID NO: 15422 - DNA, 579 bp, Gossypium hirsutum
  Clone ID: LIB3829-026-Q6-K6-A6
aaattcataaaaagaaaagaaaaaagaaagagccctttctttctctcttttggttactcaattttccgtagtattcttttgcatggcagtgaggttattgtcacatgagttatctgacttgtgtcttggcaagccagcgctgaggtcactttcagtaacatccaccattgctgaggctcttgaggtcttgaaaacctcggatgataacttcgttagtgtgtggagttgcgatcataaggctaaaaccagttcagggtttgagtcggctgctggtttttgcgataattatgatgatgatgattgtagatgtgtaggcaaagtttgtatggttgatgtgatttgttatctttgcaaagatgaaaacttggtgtcaccttctgttgctttgaaggagcctgtttcagtgcttttgcctaagattcctggccttgttttgcatgtggaaccgtcttgcagcttgttaaaagcaatagatcttatacttgaaggagctcaaaaccttgtggtaccaatcaaaaccaagctcagcaacaagagaaaacagcaccagaagccatcaccgacggtcactgtccacaa

SEQ ID NO: 15423 - DNA, 597 bp, Gossypium hirsutum
  unsure (1)..(597): unsure at all n locations; Clone ID: LIB3829-026-Q6-K6-A7
ngaacactgtnaaataaagctgccatgaacaaagnactcagtgatttcgtgctagtattttactcgaacgttcttggcatctttatgcttgccccatgtattatnncatcttctacagaaaaagaagcccaccagtgcttacatggtctaccatctgcaaaattttccttctaggcgttctcagttatggaggacagatatgcacatatattggaataggatatggatctccaactctggcatccgccatggctgatcttactccagccttcactttcatcttctccatcatctctcggatggaaaagctggacttagggatcaaaagcagccaagccaagtctttaggaactttggtatcgatcacgggggcatttgttgtgactttatacaaaggccttccactcaccacttctccaaggaagtacagctttcttcaccaagttcttgggattcctcactccaactggatcattggcggctttttcctagcctctcatagtgttatcttcgcaattattcttaatgttcagacgtggataataaggagatacccagcagagatgctagtaacactcatttgcagcatcattgtgg

SEQ ID NO: 15424 - DNA, 601 bp, Gossypium hirsutum
  unsure (1)..(601): unsure at all n locations; Clone ID: LIB3829-026-Q6-K6-A8
ggaatcctggtcccactccctgggatctacgatcctgatttcattgctgctaaccaagtgtgaacnngtgccaatannatgtcatgaagggggaccaagnaaagaacaagttcagcaggtcatcaaagacatcagggagttcaaagagaaaaacaaggtggacaaggttgttgtactctggactgcaaacactgagaggtacagcaatgtcattgtggggctaaatgacaccgtggaaagccttatggcttctttggagaagaatgaatcagagatttctccttccactttgtatgctattgcttgtgttcttgaaaatgttcctttcatcaatggcagcccacaaaacacctttgttccagggttgattgatttggctattcaaaggaactgtctgattggaggagatgacttcaagagtggccagaccaagatgaaatctgtcctcgtggatttccttgttggggctggtatcaagccaacatcgatagtgagttacaaccatctgggaaataatgatggcatgaatctgtcagcaccccaaaccttccgttccaaggagatctcaaagagcaatgttgttgatgacatggtttcaagc

SEQ ID NO: 15425 - DNA, 582 bp, Gossypium hirsutum
  Clone ID: LIB3829-026-Q6-K6-A9
cttaaacaaacgaggccgaccccatataaccatcaacgtcatcgagcgacccgaattcgattccaataccgaccgctatcttacacccgcgacgcgagcttttcgagcacggtctcctaacaatccagaagctcatattcaacgaccccgtccaagcactaacccctctaaagcaaaaattcgcatccccctcaactcaacgagtcgactcggcggccctcgctgaattgctacagatctcattcgaccattcgcgtctcgtccttgaaactctcgcttctgtcctccactcggaacccgacccgctcgtaaccgccctgccggatgatgtcgactccattggtgccgatttgcgtgatctgatcctgtttttgtatattcaatcgtataagaggcttttgccgcgctcgcacaaggactccgctgcggttgccgatgtctggccttccatgtcagcattcgatggttacttgtcggccctttcgcctttgcagcttgtccgcagcaacagccgccgatttatgccatcacaggctgatgaagaggtccaccagctatcctatctacaaaagcacttggcta

SEQ ID NO: 15426 - DNA, 595 bp, Gossypium hirsutum
  Clone ID: LIB3829-026-Q6-K6-B1
caggaccaacattgccatacttgagccctgactcagggagaaaactgcttgttggtgccaactttgcttctgccggtgttggaatcctcaatgacactggcattcaatttgtaagtcatcaaaattctctttgacaaggctcaatccccaaaccccaatatatatatccatagtttccatggcaatgtgacagtgtaggaccgcccatttagcctaattctttattgaagtgatgataaattggcagataaacattataagaatgttccggcaattacaatacttccaagattaccagacacggttggctgaacttgtcggaaacgatgaagcacagcagattgtaagcgacagtcttgttctcatcacagtcggcggcaatgatttcgtcaataactatttcttgattcccttctccgcaagatctcgccagttccttctaccagattacgttacatatctcatctccgagtacagaaaaattctaatgagactacatgatttaggagctcggagggttctggtaacggggaccggaccttggggtgtgttccggcggagagggcgatgaggagcccaaatggtgaatgtgccc

SEQ ID NO: 15427 - DNA, 481 bp, Gossypium hirsutum
  unsure (1)..(481): unsure at all n locations; Clone ID: LIB3829-026-Q6-K6-B10
tcgtgacaatgaccacagttggttacggggaccttgtccctcactcttacaatgcacaactagtatgcatttttttcataaccgtagggatgtgtctgttcggaatagcagtgaaaatcgctgcaaagtacttggttgtgaaacaacaaatggtgatggtcaatgcccttcgcatgtcacgaaaaatgggtccggtggaagcccttaaagagattgaaagcgtcaaaatagactacaataagctcaagatctccttgatcgctatggcggggcattatgtcattgggatctttgttctactcaccgtcgaaggaatggacttcaccgatgccatctactgtgcatttacaaccatgacaaccacaggcttcggagacgagaccttccaagaaccattcggtcgtatgtttgctgtnttttggatttcgaccggaacttcctgtgttggccagctctttctctacattgcggagatatacac

SEQ ID NO: 15428 - DNA, 477 bp, Gossypium hirsutum
  unsure (1)..(477): unsure at all n locations; Clone ID: LIB3829-026-Q6-K6-B11
cggccttccgggtcgacccagcgttctaaaaaagggggtgctctgctagggtttcgaccctagccccccccccgtcgccgccgtcaagntctaccgccactaggccgtcccttggcctccgacgacgctccggcgacaccaggtgtgtaaagatgtgcgcgcaagctattgatcgtgggcgaagccactgcaacgtgggggaaggggaacgattgctgcgacgccgaagaaactgctactagggttaagttttttttgttgaaactgttcaatagcttgggctgtaatttgggctaacagctgggctggtaacttaggccacgttttattaaatttgtaattgtatttagttttagtttctgttttgggcttcgggcantanttatgtgtcacactaaatgaacccaaagtctaagtctcatgccacagttgctttgtttcattgcaggtccgattgacatgaattatgggggtatc

SEQ ID NO: 15429 - DNA, 588 bp, Gossypium hirsutum
  Clone ID: LIB3829-026-Q6-K6-B12
cttcttccttcactcttcttcccgtgctctctcgtccctcacaaataaatgtctctggtggcgaacgaagactttcagcacattttgcgtgtactgaacaccaacgttgatggaaagcagaagattatgtttgctttgacctccatcaagggtattggaaggcgtttcgctaacattgtttgcaagaaggctgatgtcgacatgaacaagagggctggtgaattgactgcacaggagctggacaatctcatgaccattgttgcaaaccccaggcagtttaagatacctgactggtttttgaataggcagaaggattacaaggatgggaagtattcccaagttgtgtctaatgctctcgacatgaagttgagagatgacttggagcgattgaagaagatcaggaaccaccgtgggctgaggcattattggggtcttcgtgtacgtggtcagcacaccaagaccactggtcgcagaggaaagactgtaggtgtctctaagaagcgttgaatgtttcatatatgttgtcaggcagagtgtttatttccttggtttatacgcatcctttgcaccagtggatgtgacattttg

SEQ ID NO: 15430 - DNA, 598 bp, Gossypium hirsutum
  unsure (1)..(598): unsure at all n locations; Clone ID: LIB3829-026-Q6-K6-B4
gnanaatagacgagagaagagatcaaaggggtctagagacaaggaccaaacaacatcgcatcatcagccgctccttagcagccttgttgtaggaccatcggcaagcgacggagctgacggtggtgcaagcggaggacgaggccgtggtggtggtggtagcgattatgagcccggggaggtccggcgtgaaccgcatccttattctcgttctgatcgatacaaagatgaacctggatatagaattcgtgcaggttcaagttctcctatacgtcgtagggacgtagatcaccgtaatggttcccattttgatcgctcaggtggtccgtcacgtgtccgtgattttggtaatgggagggatcctggaagataccgagactcttcacctccttataatcgagggccaggtggtggcaggcaacacagcagccggggttttgatggaactggttatggtcctggacctatcggaggtgaaggcatgactcgaaataatcctaatgtacgccctagggaaggtgactggatatgtccagatcctttgtgcgcgaacttaaactntgcaaggagagaatactgcaacaattgcaagagatttcgc

SEQ ID NO: 15431 - DNA, 591 bp, Gossypium hirsutum
  unsure (1)..(591): unsure at all n locations; Clone ID: LIB3829-026-Q6-K6-B5
cggncgcgtgggcggacgcgtgggtgaacacctagtgactctcctcgcagttgttcccaagtattcacagaaggattggctttcaagctacgaaacattgacaacctatgtggtccctaggtcctccaagaagttgtatgaagataatgaatatgctctttacactgtcacgttatttggtcgcgtcgctgacaatttcagaactagtgcacgggaacgaggcttccaaattcgtgattttgaatatagtccagaagcacaagaaagtcgtaagcaggaactagagaaattggtacaagaccaagatagcttgcgaagctcacttttgcaatggtgttacactagttatggggaggttttcagctcctggatgcatttttgtgctgtacgtatctttgcagagagcattctaagatacggtctgccgccgtgtttcctggcatgcgttttgtccccgtctacaaagggtgagaagaaagtgcggtccatccttgaaggattatgtgatagcacaaacagcacatactggaagactgaagatgaaggcggagcaatggctggtttaggaggtgatgccgacacctatcccta

SEQ ID NO: 15432 - DNA, 366 bp, Gossypium hirsutum
  unsure (1)..(366): unsure at all n locations; Clone ID: LIB3829-026-Q6-K6-B6
gtcgacccagcgttcgcctggnacgaatcaacggatatgaaatttccgttttggtgcaaaggggctaggcctcgggcagtggacgcgctgacaccgcacgtggaggcagcggcgcagagggatgtggctagggcttgctttcctccgaaaaagttaggtgttgggcttagggtttgaatttgattttgggctttgggactggggttggtttagtttgggcttatttttatttgggtttttaggcccaggtcaaaattgacctgttacaaaatgtttatagtacaaatgagcacgaataatacataattatgtaatatttgttatattatcatgcgtaattacattatcagtaaacatttgttatac

SEQ ID NO: 15433 - DNA, 597 bp, Gossypium hirsutum
  Clone ID: LIB3829-026-Q6-K6-B7
gtttcttttgttttcagaggctgatcccttgacggcattgattcatgctgttcaagtaatgaatttcctaaaaacattgatcttgaagaattacgagaaagggaggagttggctgccaagggcaggtcgctcccatcgtactcggactcacctactgccataactggcattcatacagaaaccataaacagtggggtacctcatgatgaagctctagatggaagtgcattaaaggaacctcatactgctaagttcttccggtctgccactctgagtagacttgaatgcagtgcttacgataaactatggagctttcagtacgagtgaaagatgggaatttgaatacatttcaggtaacagcatgccaaatgcgcacgaaatagggatggggactggtttaggttaaggaaatgtgtaaggtggatgatgcaggtgccctgtaaatagtaaaggatggagaaggtggggcgtggtatgccaaaacgttaaaatgttgatatggtggttattgatgatgagatgattgctggtatttcatgattcttagtgtttgagcaaaatttgtagcttttgggatttgtttgaaggcaccaactc

SEQ ID NO: 15434 - DNA, 595 bp, Gossypium hirsutum
  unsure (1)..(595): unsure at all n locations; Clone ID: LIB3829-026-Q6-K6-B8
gcagatgaagatttaaaaaaggnaagcagctcaggtcaagaaatgttggagaaaagagcatgtgaatgataaacaaggactggaacatggccagggactcggtaacaatgtcaaaacgcagagactaatacctgaaatcattgaagaggacaatgagatgatgacaaaagatattatgcttgaccagatatctgagtgctcatctcatgggttaagccggagagaaacttcagaggctgatgatcagatgcttgggttgtgggaagccagtgaccgtgatggtacaattgatttgagtggtgataaggcccagaagattgtcacgggaccatctgaccatcaacaaattgatacagtaaaggtacacaagggcagtcagcactctacgaaatctcatgtcaaggagttgggtgtagataaagagaaatctaagagatatacagagccaaaccaagaagaaaagaagaggaagattttagaaagacttgattctgatgctcaaaagttggctaatcttcagataactgtgcaggacctgaagaggaaggtagagataactgagaagggcaaaaaggggaaaggaattgaatatgga

SEQ ID NO: 15435 - DNA, 517 bp, Gossypium hirsutum
  Clone ID: LIB3829-026-Q6-K6-B9
tactgccatctcgatcgataagatgtttgacaagttgtggggtttcggaaaaggcatgcagataacagaagttccgagacctctgcaagttcgcaaagcccaacttcgatggttccaggggataccaagtcttccggttcatcttcgagaaacaggagacactctatatcctagagagaaatgatcgaggttaatgagattcataaacagttgaaggaaaagattcaaactgttgagtgtaaaaagttgtaggattttgttgtagttgatgatgaaggttcttctcatatgtgaagtattcaaaaatagggtcaggtgcttttcgttctaacatcctattcaattgtatgatcatccatgtagttaattggaggattacttttcctttgaactttttgaaattggattccttgtgatgtatttttcttacattcaagttcagtgggtagagcaagattttacattgtaaaactaaaccactaaaatgcttggttcatgaaagtgtttggcttccctg

SEQ ID NO: 15436 - DNA, 590 bp, Gossypium hirsutum
  Clone ID: LIB3829-026-Q6-K6-C1
ccccgcgtccggtttctgggccaaccaacccttcagcaaagcaaaggttttgcggaattctcaggtctgcgcaactcagctagccttacctttgccaggaaaacctcggatgactttcaatcagtcattgcttttcagacttctgctttgggaatcaataatggtggataccggaaaggcgtggtagaggcaaagctaaaggtcgctattaatgggtttggtaggattggcaggaactttttaaggtgctggcacggccgtaaggactccccacttgatgtcattgcaatcaatgacactggtggtgttaagcaggcttctcaccttctcaagtatgactctacccttgggatatttgaagccgatgttaagcctgttggtgataacgccatatctgttgatggcaaggtcatcaaggtcgtttctgaccgcaaccccgtcaacctcccatggaaagacttagggatagacctggtgatcgaaggaactggtgtgttcgtcgatagagatggtgcaggaaagcacatccaagcaggagcgaagaaagtgctcataactgccccaggaaagggtgatatcccgacctatgt

SEQ ID NO: 15437 - DNA, 609 bp, Gossypium hirsutum
  Clone ID: LIB3829-026-Q6-K6-C10
aaaaaactaaaaaacctctgaaaaagggctccgaccctcggagctccgacctcatggccgtcctggctcgtcctagggtctggcgtgcttggtctccacgcgcttaacgagccgccaccagagccaccgtatacggtggttagggtttcaaaaaccctcccttttctttgccgattctcaggtatcaaccttctccctctgttttgagtttctattttttagatctgggtgtgtgcatgttagtaaatgaccagataagattaaaaaagaagaaaacgattcgattacctttgaaaaacgagattcgccttttatttctctgtttcaaaaggattacaatggttcgtgctattctattaggtaaatccctataccttcttttttgtttctctttgcttctaaaaactctctttttttgattccctattattcttctctctgcttttgtgtgggtgtatttctgctatcgagtctctccctccgtgtgtgtccttttttacagaataaaaagaaggctttatagcctcgactactacaatttttggaaagaaatctttgatttctttccgtatttgcttcgcatgtctgctgtgattttctttccttttc

SEQ ID NO: 15438 - DNA, 559 bp, Gossypium hirsutum
  unsure (1)..(559): unsure at all n locations; Clone ID: LIB3829-026-Q6-K6-C11
acaacaacaatggctggncacacagtttacaccctctcagagtgtctcgatacaaatccaagaacgactgttggcttgtcatcgatggccgagttctgaacgtaacaaagttccntggaanaacatccaggaggagaagaggtgttgttggaatcagcagggaaggatgcgacgataagaattcaacgatatcggacatagcaagtcggctcagaatttgctcctcaagtatcagattggtgttctccagggtcacactttaaagaataatgaacaggttggttcaaccgaggagcccaaaaagaaagagatgagtgcattcgttatcaaggatgacctgacgcctaaatatgctgcagtcgtcgagttcgccgccccactcctggttgctggttcctatttctgttacagatacctcacaccaagctcataagtgctgtaatcaatttggttttcaagttcaacctcaacatgccccttcttccctttaaataattgttggcatagaatgtttacaatgatggtgtgttgttcctttctttttatcttcacttgtcct

SEQ ID NO: 15439 - DNA, 595 bp, Gossypium hirsutum
  unsure (1)..(595): unsure at all n locations; Clone ID: LIB3829-026-Q6-K6-C12
gcgttcgnttaaatataagaaaaaaaaacatacgcaatgagcactgctggtcaggttattcgttgcaaagctgcggtggcatgggaggcggggaagccactatcgatagaagaagtggaagtggcaccaccccaaaagcatgaagtccgtattaagattctcttcactgctttatgtcacactgatgtatactactgggagtgtaagggttacactcctctgtttcctcgtatacttggtcatgaagcctcagggatcgtggagagtgtgggtgagggtgtgaatgatttgaaacctggagatcatgtgctccctatcttcaccggagaatgcaaagaatgtcgccactgtctgtcagaagaaagcaataacatgtgcgaactgcttaggatcaactgcgaccgaggtgttatgcttgctgatgggaaaaccagattttccatcaacggcaagcctatctaccactttgttggaacctcgacctttagccaatatactgtcgtccatgttggccaggttgccaagatcagtccaaccgcccctcttgataaagtctgtcccattagctgtgggatatgtacaggttttggggcca

SEQ ID NO: 15440 - DNA, 610 bp, Gossypium hirsutum
  unsure (1)..(610): unsure at all n locations; Clone ID: LIB3829-026-Q6-K6-C4
ctcggttatagtggaccctngattcagtactgcgcaagagttcaaagatttggtgtggaggataatggaggattcagccaaacccaacttgtcagattatttccctatcttaaaaagtttgatttgcaagggataagaaagcatataaggccgtcttacacgaggttgcatgagatttttgatgagatgatagatgaaagaatggaggttagagcttcagattccgtgtccagaaatggtgatttgttggatgttctgcttgatcagtgccaacaggatgggtctgacttcactcgccaaaatatcaagcctttgatcctggacttattcattgctggaagtgatacatctgcaataacaacagaatgggcgatggcagaactccttagaaaacctggagtgctacaaaaaacaagaagggaactaatggaagtcattggaactaaaagaactgttcaagaatcagacctcgataaactcccatatcttgaagctgtggccaaagagacaatgcgccttcatcctgccgctcctcttctcctaccttacaaagccaaaaatgatgtcgaaatatgtggctacaccatacccaacaacactcagcttctgg

SEQ ID NO: 15441 - DNA, 565 bp, Gossypium hirsutum
  Clone ID: LIB3829-026-Q6-K6-C5
gtcttccttgtccatctcatccccttttccagggatacggccattttccttgtttcttttttgcaggtctctttacatcagagatctgttaccaggttttgaatcccaataatgggtgtttgtttcttcatggccggagttccctgagaatatagtcgctgctgggttccggattttagggaatcttttcttccttcctcgtaaaggttttagtctgctgggtttctggtgtttttgctgagcaatgttcatttctgcttgagctaagctttttgttatttgttactgtctttcgtccatcatagttggttttaccgagtctcccacgtttttgaactcaaatgttctacacgtgatggttgggtctttttcttttcttacagtggcggattgaagatctcgagtcattgtagttatggttcgcttttggcagttcaaagtgtggtgtctagctttcacgggctttggccatggcagcagtttatgtagtctgccatgacaactcttggagttgtttttgttttatttttaccaagccctagttttgctggtctcacttgctccg

SEQ ID NO: 15442 - DNA, 582 bp, Gossypium hirsutum
  Clone ID: LIB3829-026-Q6-K6-C6
agaaaggtctgcccttatcgatgtaaggaacgattcgcctatcatcgggcttgcgatggggacaccattgtctgaaacatctaagcaatggagagccaataaaatgatgaagatgatgacccctggttctggtgaggcattactaaggagtcaagtcaagactctgttgcaaaaggtcgaagaagaagaacctgaggtttcgaatgttccgtcagggagctgtcattttcttcggggtcaaagctgtgtggtttctccaatgggacttgtagctcctactcctgcaaatacaccacaagttgaaggctcaatagtgatggctcttcctgttgttgaggaaaatttgaggatttctgaggtggtgagtatcatctttgatggagtaggtgttgaatcagagaaaagtgagataacaaggtctttgctggtagagttttctgagaaatcggaaacctcggaggattcatcagaatgttgttactctatggtgacccatgaatgtagtgcaggtaaagagaaggtatcatcatcatcatcatccattgatgatgataattcatctgtttggtcaatccaagtaaa

SEQ ID NO: 15443 - DNA, 611 bp, Gossypium hirsutum
  unsure (1)..(611): unsure at all n locations; Clone ID: LIB3829-026-Q6-K6-C7
ggactttntctggactggtttaagatctcatctcagtgaacaatggctagtctttacagaggggcatcaagggaaagacaagcagaagggaagacaccatggattaagccagcagaagaggcaagagattaaggaagcatttgaactgtttgacactgatggctcaggtaccattgatgccaaagagctgaatgttgctatgagggctcttggtttcgaaatgacagaagagcaaatcaatcaaatgattgcggatgttgacaaggatggcagtggtgccattgactttgatgaatttgttcacatgatgactgccaagatcggggagagggacactaaagaagagcttatgaaagcattccaaatcattgatcaagataacaatggaaagatatctgctgacgacgttaaacgcattgcaaaggagcttggtgaacacttctccgaaaaagaattcaggacatgattgaagaagcagaccgagatcatgacggggaggtaagtattgaagagttcatgaggatgatgaagaaaactacatatggctactagaagtttgacttatggccggagggagtgtttgatcgcagccatgcggtagctgtagctgc

SEQ ID NO: 15444 - DNA, 582 bp, Gossypium hirsutum
  unsure (1)..(582): unsure at all n locations; Clone ID: LIB3829-026-Q6-K6-C8
gcgttcggnaacgcataaaacataaaagagttgaaagctagcgctagcctagccgagtgttgcagcaatattagnngctgttgaaatccagtaggtgtttaggttaatcaggtttggggttggcattttggagttaagggatggaatcatcgtcatctgcttcgtttaaaagagctcgggcgcctgccaccggaaaccaagtaccttcatgcttggttgatggttgcactgcggacctcagcaaatgcagggactaccatcgacgccataaagtatgcgaagtccactctaagacccccaaagttactattaggggtcaagaacagcgcttttgccagcagtgtagcaggtttcattcgttggtggagttcgatgaagtgaaacgaagctgcaggaaacgtcttgatggacataaccgacgacggagaaagcctcaacccgatttcatgtctgtaaattcaggaaggtttccgtacaatcaccaaggtactcgatatttcccaatcggtagctctcaaatgcattcttggatgggaggtgtgaaagtggaaagtgatatgaagttgataaacttcagcggcg

SEQ ID NO: 15445 - DNA, 603 bp, Gossypium hirsutum
  unsure (1)..(603): unsure at all n locations; Clone ID: LIB3829-026-Q6-K6-C9
cccggtcgacccagcgtccggngtagtgcatctgttatatttgaggaaattagaaggcgtggtctcaaagtttcagttgctggaatccctaaaaccattgacaatgatatcccggttattgacaggtcctttggctttgacactgctgttgaggaggctcaacgtgccattaatgctgctcatgttgaggctgaaagttttgagaatggcattggtcttgtgaagttgatgggtcgctacagtggttttattgcaatgtatgctactcttgcaagccgagatgtggattgttgcttgataccagagtctcccttttatcttgaaggacctggaggactttttgaatacattgagaggcgacttaaagaaaatgggcatatggttcttgtgatagcagagggtgcaggacaggagctgctttctgagagcttgcaatcaatgacgcagaaagatgcttcaggaaacaagcttctccaggatgttgcgctatggatatcacagaggatcaaggaccacttctcaaaagaaaggaagatgacaataaacctcaaatatatagatcctacttatatgatccgtgctattccaagcaatgcatctgac

SEQ ID NO: 15446 - DNA, 584 bp, Gossypium hirsutum
  Clone ID: LIB3829-026-Q6-K6-D1
aaagaacttattgctaccctaaaacctttcctatttctgcccatatcaaccttttttttttgcctattgccaccccctctcctccattcgtggtggtgccgataatctcctttttctccctttcccattctctttttgtgccaattttggctgttgtatttttagccaagaaacacatttttccagccttaaaaatcatgtttttggatgtccccaactagcctttaaaaatctcttttggtgccttgcaaaatcgtccccttcgtggccaataatggtggtgtgccgccctaaaccaccattaggggctactgaattttattatttttaccacctttttccaaaaagtttttaatccgtattaccctactttaataagcatttaatcatgtgttatttaggaataattgatccctatcattcgacaactcagatctgggtaacgggtagagtaaaatgcagatttatgcgagatcttgcactgttttgattttgtttggagttgttgctttgtcaaaatgttctaaggccttaatgtggatttttttactgacttttgagtattaaatatgatgtaggtgctg

SEQ ID NO: 15447 - DNA, 593 bp, Gossypium hirsutum
  Clone ID: LIB3829-026-Q6-K6-D10
gcgttcgcccaacaccactatcagttcttttctgccactccaattccatcatattcaatctctcagttttattttacttttttttttaagtttaaataaaaataaagaataactaatacttgataaatcattctgacccaaaactctagaacttcatactgtaaccattatcttcaaccttttttttttcaaaaaaaaaaatctcaagcttttctcattttagtagttatttgctgagagacgttagcttttatggatgaaatatacgggttctactccatgggagatcagtacgttgacaacgccttgatgttaccggagaacatgatctttccttctgattaccaacctcggctttgttcttccgatcgggttccggcgtttggatccgacgagttaatctctgtcgcctccgccatctccgaagcagcttatgtcacccctcaaattcaaggagaagtggacgtttcaaacgtgatcaaagcaaaaatcgcttctcacccttattatcctcgtttgcttgaagcttatattgattgccagaaggtcggagctactccggagattgcgaggatattagacgaaattctgat

SEQ ID NO: 15448 - DNA, 574 bp, Gossypium hirsutum
  Clone ID: LIB3829-026-Q6-K6-D11
gccgccgcctgcgtctctctcttcatctctctgaaccaaaagtctttagcttttcgcttcgatagagacctgttggtttaccaggatctcatctccggtgacgagcttctttctgactcattcccctacaaggaaatcgagaatgggatgctgtgggaagttgagggaaagtgggttgtgcaaggagctgtcgatgttgacattggtgccaatccttcagccgaaggtgctgatgaggatgaaggtgttgatgaccaagctgtgaaggttgttgacattgttgacactttcaggcttcaggagcaaccccctttcgacaagaagcagtttgtcgtgttcatcaagaagttcatcaagaacttgacaccaaaactggatgcggaaaagcaagagtccttcaagaaaaacattgaggagcaaccaagtttttgctttcaaaattgaaggaccttcaatttttcgtaggagagagcatgcatgatgatggatgcttggtgtttgcttactacaaggatggtgctgttgacccaacatttttgtactttgcatatgcattgaaggaggtcaagtgctg

SEQ ID NO: 15449 - DNA, 543 bp, Gossypium hirsutum
  Clone ID: LIB3829-026-Q6-K6-D12
gcgttcggtatcgttaaaccaaatctatctgttcaccctcgtggacgccctcatgctctgccctgcaaccacatgggccactaaccggatgtatagctaccctgaagcaactggctacttatgcggggccctgtcagatccggcgcccgtcatgtgtgattactacctcctccggtcaagcccgaagctgtagctcttacacaagtgaacattttccacaccacgcccgaacattcgatcatatacacttccattgctagggcggggatagaaatctgtcaagatctgaacactgatgtgaggaatcatagtaccgctgttgaccatctagagaattctgtcaccgcttaccttgcaggactgttccatgtttccaatctctggaccattaacgctgagacggatacactcatgcccctggatataaatctatgtaagacgattatgagttagagatccatgcacaactgatttcggctaggacacgcctaatgatatagatctaacctatggataaatccacgcgtgaatgctttctcatgg

SEQ ID NO: 15450 - DNA, 588 bp, Gossypium hirsutum
  Clone ID: LIB3829-026-Q6-K6-D4
attggcttcccgtgcaccactgattgtggcgtatcagttttgccttacactcttgcagaatctgatactagataggcctccaagtacgaggaggttgaagtagagtcccatcttgttgatctttgccaggaggtattcctgttttatatagaaactgcacggtctgggcagacttctgaaacatctccggaggagcaaagccagtggttgattccttcagtttctgggaaacggagagaattggcttcccgtgcaccactgattgtggcgactctccaggccatttgtagtttgggagacaccttgttcgagaagaacttggttcaattcttcccacttcttgcgagcttgataagttgtgagcatggttcaaatgaggtccaggtagctcttagcgatatgcttagctcctctgtgggccctgttttactgcgatcctgttgaccttggtaaaattggaccgtcgtttggatgtgtgatatatttgctttcgtttacctctcatcttactctaaaagttttcaccctctcttttagttttataataattgtcaccggtaatatagtttcagtgtatgaagagctcta

SEQ ID NO: 15451 - DNA, 570 bp, Gossypium hirsutum
  unsure (1)..(570): unsure at all n locations; Clone ID: LIB3829-026-Q6-K6-D5
ccccgcgtccggggnattgtaaggcaaaagagttggaacagtcattngaataagattcgacctgccgtgtcggtgttgagaagttactcatctgctgcaaaacagatgactgtaagagaggcattaaactctgctctcgatgaggagatgtcagctgattcgaaagtctttttgatgggtgaagaggtcggagaatatcagggtgcatacaagataccaagggcttcttgataagtacggacccgagagggttcttgatactccgattactgaggctggttttaccggaattgcggttggtgctgcttactatggtgtaaagcctgttgtggagttcatgacatttaacttctccatgcaggcaatcgaccacattattaactctgccgcaaagacaaattacatgtcttctggccggatatccgtacccattgtttttagaggtcctaatggtgctgcagccggtgtcggtgcccaacactctcagtgttatgccgcatggtacgcttcttgtcctgggttgaaagtgctggcaccgtacagttctgaagatgctcgtggacttctcaa

SEQ ID NO: 15452 - DNA, 582 bp, Gossypium hirsutum
  unsure (1)..(582): unsure at all n locations; Clone ID: LIB3829-026-Q6-K6-D6
cttttcttctgtgngaaagatggataccccatataatacccatattagttcttcactttctaagttcgaggattccccagtctttaactacatcaacagcctttcccccatcaaaccagtcaaatccatacatgttacgcagacgttcaacccgcttagcttcgcatcgcttccatctattttcacttcaccccatgtcagctctcacaaggagtctagattcctgaaaagctatacagatccattgaaacccgagtcgtcttctgcggatgggactaaagttagtacaaatgaggaggcgggtgcggatgcacaggagaattttgatcaaggagtttccctgggtgagacttcttttgagatgcctaatgaaccttcaaggattgcaattgggctgccacaaactttaaagtatgattgcggtagccccgactgtgatgcaacaccttgtgttttcaagacaacttgtgtctcagacacatctctcgcaattgttccattttttcaagaggcctctgaaaaagcttatctgatggagtggaaatacgggacactttccaggttgagcaaaaaaggatacta

SEQ ID NO: 15453 - DNA, 593 bp, Gossypium hirsutum
  Clone ID: LIB3829-026-Q6-K6-D7
cgtcgggaccgtgggtgaaatgtgaaggaagtctcctcatatcttaagaaagttggttacaaccctgacaagatcccatttgtcccaatctctggatttgagggtgataacatgattgagaggtctaccaaccttgactggtacaagggtcccactctccttgaggctcttgaccagatcaatgagcccaagaggccttcagacaagccgctccggctcccacttcaggatgtctacaagattggcggcattggaactgtgcctgttggtcgtgttgagactggtgttcttaagcctggtatggtagtgacctttggcccctctggcctgaccactgaagttaagtctgttgagatgcaccatgaagccctctctgaggctctccctggtgacaatgttggattcaatgtcaagaacgttgctgttaaggatctcaagcgtggtttcgttgcttcaaactctaaggatgatcctgcaaaggaggctgccagcttcacctctcaggtcatcatcatgaaccaccctgggcagattggaaacggatatgccccagtccttgactgccatacctcccacattgctgtgaaattttc

SEQ ID NO: 15454 - DNA, 576 bp, Gossypium hirsutum
  unsure (1)..(576): unsure at all n locations; Clone ID: LIB3829-026-Q6-K6-D8
naagctcccaaggttctgggnaccaaagcagcccatgnaataaaccctctcttcctaagaagggaaagggagcaagcattccggaaaccaacgcgagaagaaaaatcccaacatcaatcttgatggaacgaagtttgatttctctggggtgccttcccccatttgctcttgtactggtgttgcaagagtgtgctacaagtggggtgccagtggttggcaatcctcatgttgtaccatcaatatatcagaatgtccacttcccatgagtcccaccaggcctggtgctcgtgtggctgggagaaaaatgagcaatggagcatatttcaaacttcttctgagacttgcagctgaaggatatgatctttctcatcctgttgacttgaaagaccactgggctaggcatggtacaaacaagttcgttacaatcaaatagagatgcagatggctggtagctgagcataatatcaatagtttcaaatatttagtaccctgctttctagtttgaatgtaatttactgttataccctagagatgatccgacaactcggattgtaaatattgtctctctgactttgg

SEQ ID NO: 15455 - DNA, 584 bp, Gossypium hirsutum
  Clone ID: LIB3829-026-Q6-K6-D9
tccgcttgcccctacagaaagctcagctcttgatcctgcaggtgatgctttcaatgaacaaattgatcaagcaatcagagattatgcaattgctcagcgtgaacagtgctatgagataattgctagtgctttacgttctctgaaggtgagggctcacagagcgaatttcggtctcctgctaggcctgttgcagtgcgatctgtccttgatcatgcttcacgaagaaatatatatgccagattgttcagcttagtgttcaatcacctgacagattgtttcatgagtacttgtacagaactatgattgatttatgtcttgagaatgagctgttggaatatgggggtcctgatttggtgccttttctgcagactgctggttgtgaacctgcacaagaggttcgagctctctctgcattgacatcagcaaccccttcagtgggtcaacctggagcttctattcattctaatcaagctaaatactttgatcttttggctcgatattatgtcttgaagcgacagcatttgcttgcagctcatgtattgttgaagctggctgaaagacgctcaattgatgggagcaatgct

SEQ ID NO: 15456 - DNA, 598 bp, Gossypium hirsutum
  Clone ID: LIB3829-026-Q6-K6-E1
cccggtcgcccagcgtccgcatagagtccgcttgtttctgaaccagagaaaataaacccaaaaaggaagagtaaagggaattagataagacgagccccaaagctcgtggaaacaggaaataaacactggtgctcccaggaacaaagaactagaggcacattgaatagcgttatgagtgaactgtaccatttaaaaaaggtggagctgtgaggtttacaaggaagaatgataatataaggccatttgaaagtggcgggtgaaacttctttagaattcttttctctcaaaactgattgcagaatactctgtttatggctcacattcgaagaaacaacctaacaatctagctatagggcgaatgtactatcaccatgtatacgatctactaaaggttggaggtgaaaattttaaatacattgaatcattcacttatgacaagaagataacacctcaggttggatctaatcctttcattgctttccatggactaagattcgagattgtatatgaactgaaacatttgaaagaagtttcgctagatcttttacgatgaaaggctgatgagaatataaaccttgctggatcggaccgtgcttac

SEQ ID NO: 15457 - DNA, 612 bp, Gossypium hirsutum
  Clone ID: LIB3829-026-Q6-K6-E10
gcgttcgggacttaagccttgttattgcctttagaggaacgcaggataacagcatccagaattgggttaaagacttattttgagaaacagcttgatttaaagtaccctggcatgcctaatgctatggtgcaccatggcattttataccgcttatcacaatacaaccatacgccctgagaattctatatgctgttaaaaaagcaaaagagttttatggggacctcgacatcatggttacaggccattcaatgggaggggctatgtcttccttttgtgcacttgacctaacggttaatcatgaagccaagaatgttcaagttataacatttggacaacctcgtatcgggaatgccgcctttgcttcttattatggcaaactcgtgccgaacacagtcagagtcactaatgaacatgacatcgtgcctcatctgccaccatactattcttatttccctcaaaagacataccatcactttcctagagaggtgtggctgtataacctcggactgggaagtgtggtttatcaatttgagaaggtctgtgatggttccggcgaagatccagactgcagtaggtcagtgaccgggagcagcatcacagaccatttgaact

SEQ ID NO: 15458 - DNA, 583 bp, Gossypium hirsutum
  unsure (1)..(583): unsure at all n locations; Clone ID: LIB3829-026-Q6-K6-E11
cccacgccgtccggnnaataatagtcactcttgtggatggnaatgatacatgtttgggatagccaaacagggaagctgatatctgtattctcagaaccatccacagattccctgcatcttgtgagccctttatcttcttcaacaaatatcggtgctgatcatgttgacatgttgaactcaaacacttcttcaagtggagtacttagtagtccatttgatgaaagcttgtacacttgtatgcattatttagaggaggttgaaaagctcgtggtcggcactggaaatggttctctcagattccttgatgtttctcaaggtcgaaagcttcatttatggaaaggtgaattcagtgaatctgcttttccttctcttgtctctgccatatgctcatgtgggtctaacaaagagcaagggaacggagcttctgcttcaccaagttggattgccgctggattaagttctggtcactgtaggttatttgatgtgaggagtggatctgttactgcttgttggcgggctcatgatggatatgttacaaagttggctgccccagaagatcatctgctagtttcaagctctcttg

SEQ ID NO: 15459 - DNA, 406 bp, Gossypium hirsutum
  unsure (1)..(406): unsure at all n locations; Clone ID: LIB3829-026-Q6-K6-E12
gcgttcgcggncgcgtgggatactcaactgtacaaacataggaagagttgaactcactataacaggatgcagtttttgtgtagttttagagcatttggactttggtcaaatgctgtaggagcatggttgtttatgcatttgagaagatgctattgggttctgcgtgattatttgggttcttttttgtttttaggtgatctggagttggatatatatatatataatattatgtaaaaaatggatatatttgctatcaagagttgaggtttttgagggttaagatgtaacatagtgccatttataggaaattgtatagtgcaaaaagacattttgttagtcacgtatcttagttttctatgaaatggatgtaaatgacaaaattagactgtgcagtgcatcctcgttg

SEQ ID NO: 15460 - DNA, 607 bp, Gossypium hirsutum
  Clone ID: LIB3829-026-Q6-K6-E4
cggccgcgtgggtggggattgactacaaagcaatgcttaagcctgaactcgaaatctatgctgacaaaataagggagtgttctaagaaaagtttgaagacatgattgtccttcagcaacaatcaaaagaaatggcttctaagattgaagacaagaaaaatgtattgctgaacttcaatcccgtattgatgaggttgaagccccaataaatttgttcaagaaggaaatacaggactgtgatcatagatctactgcagaagccaagaaaatggttgaggacgtccagttcgagacgcataagttagatatcacggaaagagaagcaacagagattctaaaggcttcgcaactgaggttgcaagaagcaatccaacaaagtgaagaggaaattcagatacacgcacgtcaactctttatggtcgttgattcagtgtcaaaatataaagaacacgttgaatccaaaatttcagagatgagggttagtctctcggaaactgctgccgccgtatcagatgcttacaagggttcattgccagcacagttccctggtagtgcgaatgcaaattagcagcaatattaagctgaaaatatgtgaatctattattaag

SEQ ID NO: 15461 - DNA, 577 bp, Gossypium hirsutum
  Clone ID: LIB3829-026-Q6-K6-E5
tttcagctaaaaattcaaccctatttcttgaaaatttctcttacggaaaaaaaagggattatgggaagctttcctcaattggcttcgaagtctgttcttcaagcaagaaatggaattatccttaataggcctccagaatggctggaaaaacatccctagttaatgtcattgccactggtggatatagtgaagatatgataccaacggtaggatttaatatgaggaaggtaactaaaggaaatgtcacgataaagttgtgggatcttggtggtcaaccaaggtttcggagcatgtgggagagatactgccgtgctgtttcagctattgtttatgttgtggatgctgccgataacgataacctatctgtctcgagaagagaactccatgacctgttaagtaaatcctcactgaatggtattcccgtgctggtactcggaaacaagattgacaaaccagaagccttatctaaagaggatttgacagagcaaatggggctcaaatccattactgacagagaagtgtgttgctatatgatttcatgcaagaattccaccaacattgatgcagtcattgattg

SEQ ID NO: 15462 - DNA, 562 bp, Gossypium hirsutum
  Clone ID: LIB3829-026-Q6-K6-E6
gctgctccgtcaagctgagccatctatcattgctgccactgggtccggcaccacccccgccgcccatgaaatctcttgtgcctctgggctcactacaacttcttcgcctacggaatcgtgtcagctgcacccagtagggattggtagcggcgtcgtggcggggatgtataccgtgacaacgccgccaccgagttgccggctggacttgtgccagccaatggggtttcagtattcaactgtagggagaaatgggtatcaacatatgccgtttacagcgttgcttttgcagccgacggcggctgcggaggaagagcagcaggtgggaaaggaagaggaggaagagaaaaggcatcaagagtagagatctcaaagtacagccatcagccacatatataaaataatatatttattgtcgagtagtatttgcatatttagtttagatttttagaatttgatcagatgatagatgctagacctttgagaaattggaaatggtttctttgtgtcatcgttgtaaattactgaggaatgcattggaaatgaagtattgccagtttttttt

SEQ ID NO: 15463 - DNA, 591 bp, Gossypium hirsutum
  Clone ID: LIB3829-026-Q6-K6-E7
aaaaagggttcttttttctccgttcacgccagaaaagcctcatcttcatctgagccttcaagcgtcctaacctttcattcatcacccagatggcaacttcacttcaactctgtcaaagaaacctcacagcttatggttatagatttctcagcttcttggtgtgggccatgtaaattcatggaacctgttttgaatggcatggctgctaagtttactgaagttcagtttgtaaaacttgatgttgatgaactgcctgatgtggcgcaggaatttggggttcaaggaatgccaactttcgtgttgctaaagaaagggaaggaagtggatagggtggttggagcccaaaagaatgatcttgagaagaaaattgagaaacacagggatctggtagctgctacttgaactttcagcttgtattttctccattaataatgtctaatgggatttccctgaatttgattatgtttaaacactttgttgtggaacaatgattgggtcctttctcttgcattcattttcttttcatcgccccacaatccctcttatgtgttgctttaatgttaacatgttgatttttatgtatcctgtctg

SEQ ID NO: 15464 - DNA, 574 bp, Gossypium hirsutum
  Clone ID: LIB3829-026-Q6-K6-E8
ctccttggttttgaggttgcaaaaggtgggataaagttccatgagatcctccaaatcatcatttttatcttagatgggatatgtaaattccatagctttctgtagaaatttgtagtttcggtatgtaaaattaattcattaggatccaataaaaactcatgtaatagtttataggcgctcctcactgaaaactccccggttggctcccctctccaaacttgaaagtcgtcatgttccgtctacgccagtggtatcttcaaaactttctcagcaatcttcgatcgaaagatcatcacaaactaaaattttatcacctctccccaccctccagcgaagacctttttcaagcagacctttcgcagaccatacacttttccaggatttattctttttcatcatcaatagacagcccggcgaaatctgactccatggacaattacatgagaaacagattaagagaattattttagaccctttagatggtagccgtcaaaccaagaaacttttgaaaacctagacttgccaaggaggcagacagaaacatgctagggtagcatacgtaattttgggttcc

SEQ ID NO: 15465 - DNA, 562 bp, Gossypium hirsutum
  unsure (1)..(562): unsure at all n locations; Clone ID: LIB3829-026-Q6-K6-E9
gtggnaaatgagctaatgctgttccttctggcggcggcggtgctaaggtggaaggcaacaggatggagtttttggttcatacctgatatggatatggatacatgccaagttaccctggctacatgccgagttatcctggatatggatacccgggttatgggtacggatacgggcacccacacccgcatggacatgggcattgttacccggcctatgttccgaactatccagtgtttgttcacccacctcaccagatgtttaatgatgagaatcctaatgcttgtgccattttgtgaggataaatggggtttatggtatagtttatcggctaagtgggaagatctactagcactctctatgcccatcgatagactgttcattcactcaccaacagaaacaaatgggaagagctcacttggaaacgaaaattttgtgttaaaacttggagctttaaaacctctttgagttcccattacgttggtctctagggttttgatgttgttaaaaaggttgaatattggcatttttaatgtgattagtagtggtattttgctgtgtggcc

SEQ ID NO: 15466 - DNA, 569 bp, Gossypium hirsutum
  unsure (1)..(569): unsure at all n locations; Clone ID: LIB3829-026-Q6-K6-F1
cttggcagccgacgtaacagnataaagagcccacatattggtgacgggcacgcctggaactggcaagacgacgacctcttctgctttggcggaggccaccaatctgcgccacatcaatattggtgatttggtcaaagagaagaacttgcacgacggctgggacgatgatctccagtgccacattatcaatgaagacctcgtgtgtgatgagcttgaggatgtgatggaagaaggtggaaacattgtagattatcatggttgtgatttctttcccgaaagatggtttgatcttgttgtagtacttcaaactgacaacaccgtgttgtatgatcggttgagtaaaagaggttatgaaggtgctaagctttcaaacaacatagagtgtgaaatcttccaagtactgctagaggaagcaaaagaaagttactcggaagatattgtaaaagctttgaagagtaataatatcgacgacatcacaagaaatgtttcaagtttaactgattggatcaggagttggcccccaacatcttgaacgcttgctattttccgcaatctaccctctgcatatg

SEQ ID NO: 15467 - DNA, 583 bp, Gossypium hirsutum
  unsure (1)..(583): unsure at all n locations; Clone ID: LIB3829-026-Q6-K6-F10
gcgttcgnattgctcggnacttggtttagtccgtacggtcacagnataatttgggctctaaaactcaaaggcatactgtacgaatatattgaagaagagtccgcaacaagagtccttcgcttcttcaatataatccaattcataagcaagtcccggtgctcgttcatggtggaaaaccgatctgtgaatccaccgttatccttcaatatatcgatgaaatttggccgcagaatcctttgctgccggctgatccctatgacagagctgttgctctgttttggatcaaatttgcagatgacaagggtcttttaatgtcaaagctttatcgaggcaatggcgaagaacaacaggcggcagtgaaggagtggttggaaatgttggaagtcatggaagaacatgcgctgataggagtgaaaaagttcttcggcggagacgagataaacatggtggacattgcattttcctttgttgctcactggcttgggattctcgaagacgtactagggcttgaaatctttaagccacacaagttccctcgagtgagctcgtggatccaaaatttcaaatcaagtcctataatcaa

SEQ ID NO: 15468 - DNA, 526 bp, Gossypium hirsutum
  Clone ID: LIB3829-026-Q6-K6-F11
gacggtgttgatgattttttttcactattgcgtgttgcttttttgtacggtttgatattgatgatagcttactctcgtttgttattataattattatgattagttatatatttttatttattttttctctaaaaaaaaaaaaaaaagaaaacactactaaaaatgagaaattaacaatggctaaaacctttgcttgctttgtcctattagctttcataggtaggtgcgcacttggtcaggctcctagctcggccccaaccaattaaccgccgtcttctaaccctactccggctcccaaggtttctccaaccatgtctccaaccgctacaccaaccgcatttccgccggcaacatccactcccccgtcttcagcccctgaatcttcaccaacttcctttcccactacttctcccccagctcctttcgctggttctcccgctggctctccccctaccgttgattctcccacgaaccccatcagcgagacaccaggcaggtctcccacttctcctacgagtgcagccgc

SEQ ID NO: 15469 - DNA, 595 bp, Gossypium hirsutum
  Clone ID: LIB3829-026-Q6-K6-F12
gcgttcggggccatgactgtcttcaagcagatgatggtgtagcatatctaatatattcatccgaagaaatagtgaacttcacattggaccactaaccaaggattatctagatgtcaagcctgatatgcgaaggattcttgtcgggcagcacagagaagcccctgctctgtttaagtacagggggacttattacatgatcacctctggttgcactggatgggcaccaaatgaagcacttgctcatgcagctgactcaatcatgggaccatgggagacgatgggaaacccctgcatcggagggaacaaaatgtttcgacttgcaacatttttcgcgcagagtacatttgtgatccctttgcctgggattccaggttcgtatattttcatggcagaccggtggaatccagctgacttaagtgactcgagatatgtatggttacctttaatagttggaggccctgctgatcggccttttgagttcaatttcggatttccactatggccgagggtttccatatattggcatcggaagtggagacttccctcgagttggagagtgacaaaatgattctcatttttcttctttccaaatatt

SEQ ID NO: 15470 - DNA, 577 bp, Gossypium hirsutum
  unsure (1)..(577): unsure at all n locations; Clone ID: LIB3829-026-Q6-K6-F4
ctgcgttttgccataatgtatattatctcttcanaaaccattaatccatcagaagcagaagctgtcgaagcagcactgagagaatctgaggttgatacaagtgcatttcagtatgtgaagaagatcaagtcattgaatgtttcattggcatcagcaaattccgctagtagaagtaacattgttgattgggctgagaagctctatggtcagtcaatcagtgctgtcactgcaggtatgaagaacctattgtctggtgataggcagctagcattgacaaggactgtggaagctttgatggaggggaagccaaaccctgaaattgattcttaccttgtgtttgatcctcgtgcctcaaagtcgagctctggcacaagtagcagtcatctgaaaggaccctttaaagaagctattgttttcatgatcggaggtggaaattacgttgagtacgggagcttgcaagaccttgcccaacatcagcagccagccaaacaagtcatatatggaacaacagaaattttaactggaatggaatttgttgagcaactctcactgttggggcagaagatgggattgggca

SEQ ID NO: 15471 - DNA, 599 bp, Gossypium hirsutum
  unsure (1)..(599): unsure at all n locations; Clone ID: LIB3829-026-Q6-K6-F5
gtcgacccagcgttcggngtaagtacgtgttctcagcatccactggtggcgatgcaagtgaatgtagcaaatcggagaagaaggaaaagatgagaagaagctcagaaaaggacaagaaaggagagaatgtcccgcgtgtagtggagatcgaagagccgtcagatcacggagctgtcgttttaagacaggcttttgccaaaagagctggagttataagaaatagcaggggcaagaagaaggaattgtctcctcaagatgctgctttggtgatccaagtaacattcagatcttacctgatccgtagatcacaggctcttcgtgcccttagggaattggcaattgccagggctaagctgaaagagctcagatcatattttaataccttctcctatcgtcgtcgagtagcccatgatgcagtagaacgccaaaggttctgtgagaaaatcattgtgctgctccttactgttgatgccattgagggagctgatctaatggtgcgagctgctaagaagtcaatggtagacgaactggaagcgatgcttgatgtggtggatcctcagccccaagggagatcactttcaatgaggaggacatttgac

SEQ ID NO: 15472 - DNA, 581 bp, Gossypium hirsutum
  Clone ID: LIB3829-026-Q6-K6-F6
gcctgatactttttgcttggtcagcctgggacctcaaatgataagaagttgtatttagttgatctgggtttggcttcgaggtggaaggaggcagcttctggacgtcatgtagattatgaccaaaagcctgatgtgtttaggggaactgtacgttatgcaagtgtgcatgctcatttgggtaggacaggcagtcgaagggatgaccttgagtcattggcttatacactaatatttttacttagaggaaaacttccctggcaaggttacattggggagaacaaaggatttcttgtttgtaagaagaagatggcaacttctcctgagatgctttgttacttgtgccctcctccttttcaacaatttcttgagattgtgaccaacatgaaatttgatgaagaaccaaattactcaaagcttatttctcttttccataatagcattgatttcaattcatcaatacgtcctatccaaattgatggagctattaagctgggtcaaaaaagggaagagcactttttgagctggaagatggtgagcagcttatgaagaaacttcggctaggttctcctgcttctcagtgg

SEQ ID NO: 15473 - DNA, 567 bp, Gossypium hirsutum
  unsure (1)..(567): unsure at all n locations; Clone ID: LIB3829-026-Q6-K6-F7
cttntagttgaggcacagnaatacacatttgaccttgtcaaactccttaaagactgaattcaatgtggtcatcacagcatgtgctatataaatatactccaaatttgcagaattaggcatggctggagaaaggagagtctcattaagcccacataaagttatgagtgcattgtcgctttatattcaaaattttgatttaacaagccagcaggatgcagctgaagcgtttctccatcttttgtcttcattaagagaagaattttctgatatatatcttcccaatcaaagtactctagcagatatttttgcttcgcaaactagtaggattctgactccagagaggaaggaggttcagaatgagcagaaaagatggcagcaacactatcttggaccttttgatggtataattggtagcattttatcttgccgcagttgttcatatcagatttctttggattttcaattttttcacagcttgcccctttttccagtgctttatggtgcttccaccattatggctggatgtaccttggaggattgcttatggcagtttgtccttgctgaaaa

SEQ ID NO: 15474 - DNA, 591 bp, Gossypium hirsutum
  unsure (1)..(591): unsure at all n locations; Clone ID: LIB3829-026-Q6-K6-F8
gcgttcgctgntggcgggagtgtgagtacgtacaatgatgagacgccggnaggaaacaacgaaagtgacacgtacgattatgatcgtaaaatcgccgcgttaccagagcggatcgcctccggtttcgccggccgaatcgactcctccggtatctcctttttctggtaatatatacacaaataatttcctcactgattgtcgaatttgtccctggtttagttcttgaaccccaaaactatcctccccggaaaggttggagtggggttgtgtaaggtaactagaggtgggactatttaaggtttgaagggtagatcggtcaatgtaattcgtgctatatgataagcggactttacgagggtaattatgtcatttgatagctttgtatgtttcttaaatggataaagataaatgaaatattaggtggatggcaagcgtgtattttgtccgagtgttgggaaatgacaaaaaggtcctcgttgacgtgcaataatgcatgaatatgatataaacttggagagaaatacatctgcctagtttggtccatttagtatgctataaatttatttatttatttttgtggggtataatgtc

SEQ ID NO: 15475 - DNA, 581 bp, Gossypium hirsutum
  Clone ID: LIB3829-026-Q6-K6-F9
cggccgcgtgggttcgacttcgtggcggcatgcaaatctttgtcaagatctcactggaaagacattaccttggaggttgaaagctctgacacaattgataatgtaaaggcaaagatccaagacaaggaagggatcccaccagatcagcagaggcttatctttgctggaaagcagcttgaagatggtcgcaccttatctgattacaatatccaaaaagagtccaccctccacctggtacttcgtcttcgaggtggcatgcaaatctttgtcaaaactctcactggaaagacaattaccttggaggtcgagagttcggataccattgacaatgtgaaagccaagattcaggacaaagaaggaatcccaccagaccaacaaagattgatttttgctggaaaacaacttgaagatggaagaactcttgccgattataatatccagaaggagtctactctccatttggttctccgccttcggggtggtatgcagatctttgtaaagactcttaccggaaagaccatcactttggaggttgaaagttccgataccattgacaatgtgaaggcaaagatccaagacaa

SEQ ID NO: 15476 - DNA, 454 bp, Gossypium hirsutum
  unsure (1)..(454): unsure at all n locations; Clone ID: LIB3829-026-Q6-K6-G1
ggnagtgcaggtgatgggacggggccagggagttgttgagcctcgagcgttggacgtgctgaccaggcacgtggggagcggcacatactgctgctagggtttcttggattgctgaaactattttaggtttgggccattttgggcttgttttagtttgggtttagctgattgggtattaaggttggttttacaaaatttgggctttatattttttgtctattattgtaatgggcccgggcaaaatttggttttcacaatccttatggcaactcctgttaggtatttattatgtagatcataaatgcaaaaagtctagttatgaggtagcaattggacgggtttgtagcaagttagcatactcaattgaccccgtcttccatggaatatgcatactaatgctgtctaattgcagattcttcatattctttaacgaaaattatagaccttttacctt

SEQ ID NO: 15477 - DNA, 612 bp, Gossypium hirsutum
  Clone ID: LIB3829-026-Q6-K6-G10
tcgaaaaagtcatacgcaatgagcactgccggtcaggttattcgttgcaaagctgcggtggcatgggaggccgggaagccactatctatagaagaagtggaagtggcaccaccccaaaaacatgaagtccgtattaagattctcttcactgctttatgtcacactgatgtatactactgggagtgtaagggttacactcctctgtttcctcgtatacttggtcatgaagcctcagggatcgtggagagtgtgggtgagggtgtgaatgatttgaaacctggggatcatgtgcttcctatcttcaccggagaatgcaaagaatgtcgccactgtctgtcagaagaaagcaataacatgtgcgaactgcttaggatcaactgcgaccgaggtgttatgcttgctgatgggaaaaccagattttccatcaacggcaagcctatctaccactttgttggaacctcgacttttagccaatatactgtcgtccatgttggccaggttgccaagatcagtccaaccgccccgcttgataaagtctgtcccattagctgtgggatatgtacaggttttggggccactgtaaatgttgccaaacccaaaaaggtcaaactg

SEQ ID NO: 15478 - DNA, 591 bp, Gossypium hirsutum
  Clone ID: LIB3829-026-Q6-K6-G11
gcgttcgaaagagtctctctattgtctcttctctttcattgattctcatccagtccagccatggcctacataacttgaatccttcaatcttttaacttttcattgttctttcctgtcccaacgccctcatccaatttgtttgatagaggcgttttttatatttgaaccaaaaaaaaaaacgatcactgttttttctcctacgcagaggagatattaaatcactgtttccgaataatttggagtaagcttttcaaagaagagaagaagaatccaagttttctcaacgaaaatggggcttatttcggggatttttctggggataatcttcgggatttcattgatggctggctggcgtcatatgatgaggtaccgaagcaccaagagaatcgccaaggccgctgatataaaagttcttggagctctcaacagggatgatcttaagaaaatttgcggcgataattttcctgaatggatatcttttcctgtctatgaacaggtgaagtggctgaacaagcaattgagcaaattatggccttctgtagcagaggcagcatcagcagtcatcaaagaatctgttgaaccactcttgga

SEQ ID NO: 15479 - DNA, 590 bp, Gossypium hirsutum
  Clone ID: LIB3829-026-Q6-K6-G12
gcgttccgtcaccagtttattcttcttagccttgtaatatacatctctatgaaaaacatggcccatcttgtaattcctgagaaagcggtcctggagatcatctcatgatgatgctgggtttttcatgcctcataccgctggtcataaattcaattctcttgacttcatacacggttgtattgctgttaatgcagaatcacttatttgtttggagtgttttctcacccaagtacttgtatgtttgtgctacagccgtgtgcacttatattggcgtctttatcgttgccacaactggattttatgcttattttgtactggacatgcggaagcagaaaccatacccttgttagcaacaagccaacaacactaaatagtcaatagcgaatgcagcaactagcaaactgattttgcattcttccaaacgaacggcagtgattgaagttgagttaatccttgtaggtttcagttaatttcttttatatttgattcttttaacttcttggatgtaatcttgcttgcataagatactggaagcaatgtctgctagaatgtaactttacagggtaaagaatcatgtttgggtcaaatga

SEQ ID NO: 15480 - DNA, 602 bp, Gossypium hirsutum
  unsure (1)..(602): unsure at all n locations; Clone ID: LIB3829-026-Q6-K6-G4
gtcaaattatcaaaatagaacctctgggactagattggagattatccatgcctgaccctcctaagtttgctagaccaaataaaaatcaagtgataagatgccattgcaatctaagaagatacatgttggtccatatctaatggcactaaatggtcccctaagatggatgttgcagaatctggacacaattatattatgatggttgaagttccaggtgtcagcattggtgacattagagtggaggttgatgaccaaaatttaacggtgaggggtaaacggtctagccattgttggaaactagctgctgattgctctgatggctcaatctctgcatatcacaaaagggagatatcacaagggccttaccaggttgtgtggccacttcctgctaatgtaaacagggacagtgtctcagctgagtttctagatggatttttacgtattgttattcctaaactttgagatcaaactggtggtggaagcattcatgcacatatatgaagacaaacttatgtactatccatttatgttcaatgcctactctcagtatctgttgctgttattaaattgttagcaaggactntgtaaatccgtactaaaat

SEQ ID NO: 15481 - DNA, 592 bp, Gossypium hirsutum
  unsure (1)..(592): unsure at all n locations; Clone ID: LIB3829-026-Q6-K6-G5
cttngaaagaactcctccggcgtgtccatgccacatcggagacctgtccaattcgcttattctcaccataaagagtctcctttacagcccagatcatttgctgtgaaagacgaaatcttctgcttgtttgagggagcccttgataacttggggagtttaaagcagcaatatggtctggcaaagtcagcaaatgaagtgatattggtcattgaagcttacaaggcccttcgtgaccgagcaccttatcctccaaaccatgtggttggccatctaattgggagctttgctttcattgtctttgataaatccacctccactttgtttgtggcttctgatcaatttggtaaggttcctctctattggggaatcaccgccgacggatatgtggcctttgctgataatgctgaattgctgaaaggtgcctgtggcaaatctcttgcttctttccctcaaggctgtttctactccacagcagtaggaggattaagaagctatgagaatcctaagaacaagatcactgcagtgcctgctgaagaagaggagatatggggtgctaaattcaaggtggaagggccagctgttgttgctgcca

SEQ ID NO: 15482 - DNA, 587 bp, Gossypium hirsutum
  Clone ID: LIB3829-026-Q6-K6-G6
ctccttatctcaccttcaccgccgtcttcttcatcctactacttcttcaacagccaccgttataaccactgcaacgccgcctctttcttcttcttcttcttcctcctcttccactactaagactaaccctgctcagccggttgatgcttcactagctattgctaccagatctagcgcttcccttaacatcgatgattctacaaagaagaatcaacccaacttgccaccgtcgtcgaacccaccggcgaaacggtccactaaagaccgtcacacgaaggtggatggtcggggacggcgtataagaatgcctgcagcttgtgcagctagggtttttcagttgactagagagttgggtcataaatctgatggtgaaacgattgaatggcttttacagcaggctgagccggcgatcattgcagccaccggaactggtactataccggccaatttttcgactcttaacgtttcgttgagaagtagtgggtctacgctttcagctccaccgtcgaaatctgctcctcactcgttccatggtgctttagctttggcttctcatcatcacccatatgaagaagggtttgctcata

SEQ ID NO: 15483 - DNA, 610 bp, Gossypium hirsutum
  unsure (1)..(610): unsure at all n locations; Clone ID: LIB3829-026-Q6-K6-G7
tgnaattacttcctcgcaccaagccattggataatctagaaccacctgttgttgatgctaagcaggagcagcagcagttgagcgaatctgttcttactcatgctggaattggtaatgattcatatggatatgtgaatactgtgaaacctggttcagctggcagtgagaatgggaaccaggcagtggagcgtcctaagctgaatttaaagcctcgatcacagcctgttgaacagttggagggtaacattgagaaagaaagaaatgtgttgttcggcggtgctcgcccacgagaactggttctgaaggagagagggattgatgacagcatccatgagccggaccaacatcctgatagggtcgtcaagcataatgttccgaggagtgaaaaagtagcagagcaagcagctcctcgtcccagtgaaagagttgggaatcctcctgttgatcagagagctggaagaaaatctgagagaaaccatggtgtttacaatgaaagagttgatacgcagaggaggaaccggcctaatgaaaactggcggaatgacaaggaaattgagaggcagcagcggcaggagaggcagccatcacctgagacctggcgtaagcctgc

SEQ ID NO: 15484 - DNA, 590 bp, Gossypium hirsutum
  Clone ID: LIB3829-026-Q6-K6-G8
cggccgcgtggggcttgatacactttgtgatctctatgataccttagcatcacccaagtgtcatttttgtgaacactaggcgtaaggttgattggcttacagataagatgcgtagccgtgaccatacagtgtctgctacccatggagatatggaccaaaatgcaagggacattatcatgcgggaattccgatctggatcctctcgcgtgcttatcaccactgatctcttagctcgtggtattgacgttcagcaagtctcacttgtgatcaattatgatctcccaacacaaccagagaactaccttcatcgaattggtcgtagtggaagatttgggagaaaaggtgttgccatcaactttgtaaccacagatgatgagaggatgctatatgacatccagaggttttataatgttgtaattgaggagctgccatcaaatgttgctgatctaatttgattctggttcaggctggctaggtaaatggctctctgggaatgacaaagcttaggaggtccagttacaactgggagggatttcgttcctgcacatttagttgagctcccattaccatataaaaaacccaatgttcaa

SEQ ID NO: 15485 - DNA, 589 bp, Gossypium hirsutum
  Clone ID: LIB3829-026-Q6-K6-G9
cacatctcaacttcctcctcatacaaattgatcgtcccgttagcacatctatttacttcttgttaccggctgggagcgtgtctcaccttcaccgtataccctgtgctgagacctggcatttttatttgggagaacctcttacggtcttggagttggatgagaaagatgggcaagtaaaactaacatgtcttggacctgatttgttgaataatcagaaggtgcagtacacagtgcctccaaatgtttggtttggtgcatttccaacaaaagatttcaacatttcgactgatggggcagtgacaaaaaatgatccaagggatgctgagagccattattcacttgtaggatgcacctgtgcacctgctttccagttccaagacttcgagctggcaaaacgatccgagcttgtaactcgcttccccaaacatgagcatctcatttctttactcacttatcctgattgaaacaaagcttctcaaattcatctcacaatcacgaatctgtattattttcccatcttctgctgtgttagtataaggttaaaaacgatctagtctacctgtactgtcgactccattctgctatgtat

SEQ ID NO: 15486 - DNA, 164 bp, Gossypium hirsutum
  Clone ID: LIB3829-026-Q6-K6-H1
tgaggccagtgaacatcagagtaccccacattagcctataactaaggaaagtgtgtgcctagggctctgtgttgcacttctgggcgccgcttgtttcgcgctgcttgctctgcccgggcgcgtgcgtgggctcgggctgggcggtccggtgggggggggggcgc

SEQ ID NO: 15487 - DNA, 591 bp, Gossypium hirsutum
  Clone ID: LIB3829-026-Q6-K6-H10
tttgctttcaataacctctctacttctactgcttatctgtcttcttttggcttctttggtccccataagatgcgtagcatggtaagctctacctctgccaaagcatcgccgccattgtaggcgtcggaccgaagcttgggcgatccattgcccgcaagtttgctcatgaaggatacaccgttgccatcctggccagggacttggggagattgtcaagatttgcagatgagatagcgagggatagagaaagcgcaagtgtttgcaatcagaatagactgctcggattctagaagcgttagggaagcatttgaaggggttctctcactaggatttgttgaggttctggtatataatgcataccaatcagtttcatggcaccccacaaactttactgacattaaaatcgattcctttgagaaatctctcgctgtgtcctccattggtgctttcctttgcgttcaaaaggtactccccgggatggtggaaagaggaaaaggaaccattctcttcactggctgctcagcttcactcaatggcattgctggtttctctgaactatgctgtggaaagtttgccctgagagcattatcc

SEQ ID NO: 15488 - DNA, 587 bp, Gossypium hirsutum
  Clone ID: LIB3829-026-Q6-K6-H11
gttggccagtactcaatgccaacaatttcatccacccacagtggcagaaccaacagagggtttccagctatctgcacagaatcaagttccaccatcccaaactgatcaaagctttgtgaggtcagacttaaagtacgaatataaaatgtctgtcaatgaacaagccattagtccagaccatcttaatcatattagccaagggccagacatcaattctttgatatcatcatctgctgtgaaagcacaggtccttgattcaattaaatcaagtttcattgtggacccccaacctgtgccaagcttggagcaggtttcctcacaatttcatggtgcattgacattaggcactcgtgaacagagctgtgaatcccgggaactggatattccgaacatgaataaccatgtctttgaggaccaagttctatcagcagaagaagcaagtactgctgcaagcccttctcctgattcttcggagcactctgttaatttcaagggaacaacgaccagcaatggtgctaatgctattatgcctgagaagtcagtttcaactgggcagactaatatcttgatatcagctaagacttctg

SEQ ID NO: 15489 - DNA, 588 bp, Gossypium hirsutum
  unsure (1)..(588): unsure at all n locations; Clone ID: LIB3829-026-Q6-K6-H12
cggccgcgtgggnaaaattaagaaaaaaatcatacgcaatgagcactgctggtcaggttattcgttgcaaagctgcggtggcatgggaggcggggaagccactatcgatagaagaagtggaagtggcaccaccccaaaagcatgaagtccgtattaagattctcttcactgctttatgtcacactgatgtatactactgggagtgtaagggttacactcctctgtttcctcgtatacttggtcatgaagcctcagggatcgtggagagtgtgggtgagggtgtgaatgatttgaaacctggagatcatgtgctccctatcttcaccggagaatgcaaagaatgtcgccactgtctgtcagaagaaagcaataacatgtgcgaactgcttaggatcaactgcgaccgaggtgttatgcttgctgatgggaaaaccagattttccatcaacggcaagcctatctaccactttgttggaacctcgacctttagccaatatactgtcgtccatgttggccaggttgccaagatcagtccaaccgcccctcttgataaagtctgtcccattagctgtgggatatgtacaggtt

SEQ ID NO: 15490 - DNA, 54 bp, Gossypium hirsutum
  Clone ID: LIB3829-026-Q6-K6-H2
acaccgcggcaagctaccgtccgctgaccgcctttggatcgattaagacccact

SEQ ID NO: 15491 - DNA, 186 bp, Gossypium hirsutum
  Clone ID: LIB3829-026-Q6-K6-H3
attttgcactaaatcctctcaattctccccagaccaccaccgatcacccctcacctacacctcaccgaccacctcaattgctctcatctcccacctgcccccccacaccaagcctctcataccgcacctgctcagaccaccccagctcacctctaatccgcaccccgcatgcctctcagaccccac

SEQ ID NO: 15492 - DNA, 457 bp, Gossypium hirsutum
  Clone ID: LIB3829-026-Q6-K6-H4
ggtcgcccacctcgccgtccgctcctcactgcactcttcttacccataactacaaaggttctccaaaaattacccagcggagactagtggttgccaatgctgctaagggagctcaagtggagagtgtccagatgagcagtgagaggaaaacagagggcaacaatggaaggagggagatgatgtttgcagctgcagctgctgctatttgctcggttgcgggggttgcaacggcggagcctaaacgtggtagcgcagaggccaagaaggcgtatgctcctgtttgtgttactatgccaactgctaggatctgtcgcaactgaggcagtgccactgctcattgctcgagtgctatgagactatgcttgttatgggcaggggctgaaggatgtaatttaataatgcttgtaattttgcatttttataattgagaaacctaatttaaatttgtgtttttctt

SEQ ID NO: 15493 - DNA, 630 bp, Gossypium hirsutum
  unsure (1)..(630): unsure at all n locations; Clone ID: LIB3829-026-Q6-K6-H5
cccgggttctacccacgccgtccgcggtacgcgtggtgcggtacgcccgtgggcggnaccgcgtnngggttagnatattcaacccagttacacncnngcagtgctcaagggtggnagtggcgtgccatcatatcatatcggaaagaacaccgagaggaaggaaacgaggcagatggattttatggaggaatcagaaaactttgcagtgaggaggagatttccacatggaagtgcctttggccatctgaaatcctggaataggcagcctgcattgcgaaaaagtcaccatcctttctctgcaaaaattatcaagtttttgctctacaaattgatgctcttggaaactgaagatcaagttgaaagttgcatgaatgtggagtgcgcagtgaatgtaaaattcccatatttacatgccaatatagtatatcccactaccaaggttttgttgaaaaccatttggaattggaaaccccattgattatggaagaaatatatataaccttctagagctctgaaaaaaaaaaaaaaaaaaaaaaaaaaaaaaaaaaaaaaaaaaaaaaaaaaaaaaaaaaaaaaaaaaaaaaaaaaaaaaaaaaaaaaaaaaaaaaaaaaaaggggggggcccctttt

SEQ ID NO: 15494 - DNA, 582 bp, Gossypium hirsutum
  Clone ID: LIB3829-026-Q6-K6-H6
ttaaatataagaaaaaaaatcatacgcaatgagcactgctggtcaggttattcgttgcaaagctgcggtggcatgggaggcggggaagccactatcgatagaagaagtggaagtggcaccaccccaaaagctgaagtccgtattaagattctcttcactgctttatgtcacactgatgtatactactgggagtgtaagggttacactcctctgtttcctcgtatacttggtcatgaagcctcagggatcgtggagagtgtgggtgagggtgtgaatgatttgaaacctggagatcatgtgctccctatcttcaccggagaatgcaaagaatgtcgccactgtctgtcagaagaaagcaataacatgtgcgaactgcttaggatcaactgcgaccgaggtgttatgcttgctgatgggaaaaccagattttccatcaacggcaagcctatctaccactttgttggaacctcgacctttagccaatatactgtcgtccatgttggccaggttgccaagatcagtccaaccgcccctcttgataaagtctgtcccattagctgtgggatatgtacaggttttggg

SEQ ID NO: 15495 - DNA, 346 bp, Gossypium hirsutum
  Clone ID: LIB3829-026-Q6-K6-H7
ggagttgaagaactcatggactttcaccgaggccgtgaagctcaggaatttgtgtgtggacttgcaccgagaattagaaagctagaggagagagctcaattgaggaccaaggaatcacccagtgttccattcagttgggtttctggtagagaagtgaagctctaaattggctatcctccaagtgacttgtaatacaagaaagaaacaacagggcttagggaggagcatgatgaaaactgcaactctgtgtttagctggaatgcaataagtggtgaagtgtgtgtgtgctgtttcgttgttacttttcttaaaacaagtaatatcaacatcttcctcctatttgatg

SEQ ID NO: 15496 - DNA, 585 bp, Gossypium hirsutum
  unsure (1)..(585): unsure at all n locations; Clone ID: LIB3829-026-Q6-K6-H8
gnaggntgccgccacttcatnnggtcgaatggatgttaacatcagcttgctttccaattgcgttgccgcttatgtccgcgatgacaactctgacatcgtcgctactggacaccatgaaaaactctgtttatgtcaaagcaaaggaatgttcagaacaactttcggcagaggaatttgctattctacttggcaagcacttcacatcattttatccacaggtttttactgcaatagtaaagatagtggaaaagccatgggaacgcatttctgtcaatggccaaccacatgaacatggctttaaactgggatctgaaaagcatacaactgaagcgattgtacagaagtctggtgttttacagctgacttctggtgttgaaggcctgtctttgctgaagacaacccagtcaggatttgaaggattcatcagggacaaatacacagcacttcctgaaacacgagaaaggatgctagcaacagaggtcacagcttcttggaggtattcttatgaatctgtctctagcatccctcaaaagtcgctctacctcaatgagcaatacttgaatgtgaaaaaggctttggtcgatg

SEQ ID NO: 15497 - DNA, 423 bp, Gossypium hirsutum
  Clone ID: LIB3829-026-Q6-K6-H9
gggagcaactggggagaggacggatattacaaaatatgcagaggtcgcaatgtttgtggagtagactccatggtctcaagtgtggcggctttgcatacaaagtctcagtagcattgccctgtaaatgactgatataagtaacggtaatattagtatccgtcagtatgtcttatctctggatttatgccatctgctagaacgggtttattccaatcctggtttatgcagccacctttaaaaggctgcatttagtagctttagaatttgaatctcagcatatgaacctcttttttcttgggcaatgattttcattgtaccaaagaaaaggggtgtatgctagagatgattattacttatttgtgttgtaaccaagtgttgtgatgtatatcagtctacctatatatgaatttggaacttggtctt

SEQ ID NO: 15498 - DNA, 583 bp, Gossypium hirsutum
  unsure (1)..(583): unsure at all n locations; Clone ID: LIB3829-027-Q6-K6-A1
ttgcaccgaaaccgatcaagacttcgcatctctcgagctcaaaaaaaaaaaggatctcagaanatgggtttcgattctccgctcttgaatactctccaacacatgatggatctttctgacgatacggagaagatcccgaacgcaccatcaaaggtttacatgcgggatgccaaagccatggctgcaacaccagcggacattaaggagtaccccaagtcttacgtgttcatcgtcgacatgccggggctgaaatcaggggacatcaaggtccaagtggaggacgacaatatgctcttgatcagcggagaaaggaaacgagaggaagagaaagaaggagccaagtacgtgagaatggagaggcgggtcggcaagtttatgaggaaatttgcgttgcctgagaatgctaacgctgatgccatctctgcaatctgtcaagacggggtcttaactgttactgtggagaaactgccaccccctgagcctaagaaacccaagaccatcgaggttaaaatagcttgaagcagctttagatttacggttaattgtcaatgggggctttaaataagttgggggttagccctgt

SEQ ID NO: 15499 - DNA, 598 bp, Gossypium hirsutum
  unsure (1)..(598): unsure at all n locations; Clone ID: LIB3829-027-Q6-K6-A10
cggccgcgtgggcggccgcgtgggtttgtttcttatcttgttgttggtctggaaatctcttcactctctcttttgcttccaagttttgctgctaacagtatatctttngaaagtcagttgatattacaattattcccttcccaaaccttgcatcatcaatcatggttcctttcatttatgttgttcttttcttagccatgtctggccattcaagtgccaactattgcttatgtaaagatggagtgaatgagcaaacacttcagaaaaccctagattatgcttgtggagcaggagctgattgtactccaattaatcaaaatggtccttgctataatcccaacactgtgaaagatcactgcaattatgcagtcaatagctatttccaaaagaaaggtcaagctcaaggaagctgtgatttttcaggcactgctactgttagtgttaatcctccttcaaatattccctctacttgcagttttccttccagtggtacaagcacaacaccatccacagggactccgacgacaccgaccacagggacgcctacctcaacaccaaccacagggactcctaccacaccaacaacggggacaccgac

SEQ ID NO: 15500 - DNA, 507 bp, Gossypium hirsutum
  unsure (1)..(507): unsure at all n locations; Clone ID: LIB3829-027-Q6-K6-A11
gcaattcgcaatatctctgctgactcccaactgccctgaccataccgatggctacatcatcgaatctgaacagatagttatgtacaactcctaatctgtaaagatgatgttgaaagtataaataattgcacaaatcagagctacttggaaccgccagttaatctcgttgcttctatttattttggcatgtccatcacacactgcagngaaaaaacaacgtcttaacttgtttttccattgattctgcacagattattcggggcgtcggttgttatatttggagaaagtgaccttctgagataaggtgaagtagaaaatctgcaaagaaatacttggactgttttaaactgtagtgttatgagtttttggttttgttttgtcttaactgtacattggtgggtgggattagaggtgtccattctcaggttggctttgtttgcccaaacttgattagattttaaagctcgttttattgttttaaatatatgaaaaggtaattttgatatc

SEQ ID NO: 15501 - DNA, 581 bp, Gossypium hirsutum
  Clone ID: LIB3829-027-Q6-K6-A12
gcagtatatacacgccgtttcgtgatatatataaaggaaggtgtgtacgaagaacggtgagggtgccactggagaagaaaatgtggtctttttgggggatggaatgggtaaaaccatcattgcgggtgctttaaatgcagggatgcctggacttaccacttatgagactgctactgtcggggttcttggggatggatttatggccagtggactcacaatccggaacacagcaggccctgatgcccaccaagccgtagcctttagatcagatagtgatctttctgtcattgagaactgtgaattcctaggcaaccaagatactctctacgctcactccctccgccagttctacaggaagtgccgtattcaggggaacgtggacttcatcttcgggaattctgcctcggtgttccaagattgtgaaattttggttgctccccggcaggtaaaacccgaaaaagtgagaacaatgctgtgacagctcatggtagaactgatcctgctcaatcgactggtctggttttccagaactgcttgatcaacggaactgatgaatacatgagatactattatagcaagcc

SEQ ID NO: 15502 - DNA, 581 bp, Gossypium hirsutum
  unsure (1)..(581): unsure at all n locations; Clone ID: LIB3829-027-Q6-K6-A4
cgngnggccgccgttctccttctgtctccggctccggttcctcttcccgttctcgttcacggtctaggtctcgctcccgctcttattccggttcagactccaagtccagttctcgctctcgctcagtgtcccgctccagatctgcttccccgtctagctctcgttctcgctccagatctttatcctcttctccttctcgtagcggtagctctcgaagtcgcagtcctcctcagcgtcgaagtgcgactgatgcatctaggcgaggtcgttcccctcctccgcaatctaaaaaatcatctcctgctccgaggaagacttctcccatccgtgagtctctggttctttacgtcgactcactgagcaggaatgttaatgaaggtcatctaagagaaatattcggtaatttcggtgaagttgtaaatgtggatcttgcaatggaccgtgctcttaatcttccaagaggatttggagatgttgaattcaagacaagagcagatgctgaaaaagctctactttacatggatggtgcccagattgatggcaatgtagtaagagcgaaattcacacttcctccacgacca

SEQ ID NO: 15503 - DNA, 602 bp, Gossypium hirsutum
  Clone ID: LIB3829-027-Q6-K6-A5
gctaatacctgcagcaagtccatgggaacaaaataacctgactagtaaatcagaaaacctgtgaaatctgtccctcctgcaagtggttcaaccactgcttctagcaggggtaaaattgaagaagcagaagaaaaaccaaagataacgaaggaggaagaggaaatggctaggaaggcagacgaatcgagaaaggaagaggaagcagctaaattaagagagcaacgtcggttggaggagatagctaaagctaaggaggcactagagaggaagaggcgaaatgcagagaaggcacaagccagggctgcactaagagctcagaaagaagctgagcagaaagagaaggaaagagaaaagagggcaaagaagaaggaaagaagaaaggtggctgcagcaggagtaggggatgcaagtgttacagacgaaaccgaatctgctctgactttggaaactccagctgaaactccaaaagattctgaaagtacagagaaacttgtgacagtggcaaagagatctcaaaagccaccacagttcacaaaacaaagcaaggcaaaatccattccgccgccacttcgtaaccgtggtaagagaaagatgcagcaatg

SEQ ID NO: 15504 - DNA, 586 bp, Gossypium hirsutum
  unsure (1)..(586): unsure at all n locations; Clone ID: LIB3829-027-Q6-K6-A6
gcgttcggnaaactttgtcttgttgggttgtgttttgtttttggatgggaactgagagaatgaagaactgtgttgaagaaagagaagaaatataatggtggggaaagtgagagagggcaatggttgttgttgtgcagttgtaaatttctacaaccttgtacaagttggtcttgttttagacaagggtgttactctttttacaagtgatactacagccattttgcatctcttaaatcttgtataaaaacaaaacatctgtcccagaacaatacacaattaaggctctctctctcttttttctttttctttttaatctgtttgaaatttacctaaaggttgattcaaccatgaagaggtcacttggcagctcatattctttgggtgctttgatgtccatctgtcccacaacagatgaacatagtcctaggaacaaccatgtttacagcagggagtttcagtcgatgttagatggattagatgaagaagggtgtttagaagaatcaggtcatgttgctgagaagaagagaagattaagtgtagatcaagttaaggccttggaaaagaattcgaggttgaaaacaagctt

SEQ ID NO: 15505 - DNA, 590 bp, Gossypium hirsutum
  unsure (1)..(590): unsure at all n locations; Clone ID: LIB3829-027-Q6-K6-A7
cttaagcccttcctcagnagatacttgnaanatctgtaaggaggttaaggacaggaggttgcagctcttcaaggaccatttcgtcgaagagaggaagaaacttggaagcacaaaaagcatgaacaacgatggattgaaatgtgccatagatcatattttggatgctcaacagaagggggaaatcaatgaggacaacgttctctatattgtcgagaatatcaatgttgccgcaattgagacgacactatggtcgatcgagtggggcattgcggagctggtgaaccaccctgaaatccagaagaagctgcggcatgaacttgacactgttctaggacctggtaaccagatcactgaacctgacacccacaaacttccctaccttcaggctgtgatcaaggagactttgaggttacgaatggcaattcctctactcgtgccccacatgaacctgcatgatgcgaaattgggtggctatgatatccctgctgagagcaaaatcttggtaaatgcatggtggcttgccaacaaccctgctaactggaaaaatcccgaagaatttaggcctgaaaggttctttgaagaggaagcca

SEQ ID NO: 15506 - DNA, 587 bp, Gossypium hirsutum
  Clone ID: LIB3829-027-Q6-K6-A8
ggttttcgctagggcttctggtgattacgctattgttattagtcacaaccctgataacgacaccaccaggatcaagcttccatctggttcgaagaagattgttccaagtggttgtcgtgccatgattgggcaggttgctggaggtggtaggactgagaaacctctgcttaaggctggtaatgctttccacaagtatagagtgaagaggaactgctggcctaaggttcgtggtgtggctatgaacccagttgagcatccccacggaggtggtaaccatcaacacattggtcatgctagtacagttagacgtgatgctccacctggacaaaaggttggtcttattgctgcaaggaggactggtaggctcagaggacaagctgctgccactgctgccaaggccgataaggcataataggatactagttgttttggcgtttatatttacatcaatgactgttaaagcacacatttaagctagaaattttgtttgaaatttcagatatggtactgttttggagtttggatgacagttgtttatgttttcgagtttgggtttttatgtgaaagtgttttatgccagtgtttcc

SEQ ID NO: 15507 - DNA, 529 bp, Gossypium hirsutum
  unsure (1)..(529): unsure at all n locations; Clone ID: LIB3829-027-Q6-K6-A9
gggngaattaatgtttcaaagnattcagatgtttaccctaccagttgcagtgggcatcaaaataagcagagtaaaagtcctaagcaagatgtagaagaacttgaagcttacagagcctcctttggatttagtgcagatgaaataatcaccactacccatatgtggagattactgatgttacagatgattcatttacaatgagaccttttcctatagataaacctgcttttgaagaaagtacagaacctgcatcgattgccaaaggatcaaagacagataggatacaggaaaactttctggatgagaagaaaggaaaatcaaaatctgatattgtcaattgggctgtacaccatgatgtgcaagttgcatgcaatggatacgaagatcagaaatcaaggaggcaggtgggtgatgtctcatgatcaagtacacctatcaaccataccttgactgatgaagaggatatatacttgaagaagagttcatcaaggagcaggaaatatcaactaggcttgtctagctctgatgc

SEQ ID NO: 15508 - DNA, 586 bp, Gossypium hirsutum
  unsure (1)..(586): unsure at all n locations; Clone ID: LIB3829-027-Q6-K6-B1
aaatattaaatttctttctcttttgatcgatacttgataatatgtcaggaagaggaaagggaggcaaggggttgggcaagggcggagcaaagcgccaccgcaaggtcctccgtgataacatccagggaatcacgaaaccggcgatccggcgtctagctcgtaggggaggtgttaagcgtatcagtggcttgatctacgaggaaacccgtggagtgttgaagatcttcttggagaacgtgatccgcgacgccgtgacctacactgagcacgccaggagaaagacggtgaccgccatggatgtcgtttatgccctcaagaggcagggtaggactttgtacggtttcggtggttagattggtgtttactgttcaggattgctgaagttggctgcgatggcggcggcggcgatggtggtggggggaatttgaagtcttgcggtcaagaatgtttgagcgtagtatcagcgttagggctttgtaattagtgactattagaaattagacattgggtactgtatgctttcgtttacgatttgtgattcttgtactggattacagattttaatngaagttttgagttcatttct

SEQ ID NO: 15509 - DNA, 587 bp, Gossypium hirsutum
  unsure (1)..(587): unsure at all n locations; Clone ID: LIB3829-027-Q6-K6-B10
ggnaaattcattgccatctttgccctcaaaactgcgggggctgtaaatcctgatacaaaggaagcatcacaaactggtaaccttactatccggattgggaaagataaaggaagaaggcgaaggaaaaggaaaggtgggtttaaagaattgattgaagtttcaagtagtcaaagtggaaattctacaccttcatcccctcactcccccacatctgtaacatccaatcgcacatggccactctcccccgatgtggagcaacccattgaatctagaaatccttttacacatttggctaaccaaatccgcgagaaaggtaaagttcctcaacctatttcaaaagcaaatgtgttgggacctaaggtttctgtggaacatgtcagcaacaactggtattcttcacaagagcagcctagaataccaaggcaaaatgtttcacaacctgttctctcgtactctgctacttttccttgtgctagtagggcgaccaccagtacacggagctcctcttctcctttggcttcaatgtctgttattgctccttgtgctcgagctccagggtccaaactctctgaccagaaaatcataaa

SEQ ID NO: 15510 - DNA, 594 bp, Gossypium hirsutum
  Clone ID: LIB3829-027-Q6-K6-B11
tttttctccttcttctccagttccaaagcttcactttctcagctgctattttttttttgttcacaccctcaagtctcttttctccatcaatctgaagtagaagatgggaacattgggtaaagcaatctacaccgttggattctggatccgagaaaccggccaagctctcgatcgccttggttgccgcctccagggcaactactacttccaagagcaactgtcgaggcatcggacgctgatgaacgtattcgacaaagctccttttgttgatagggatgccttcgtggcacctagcgcttctgtcatcggtgatgttcaggtcggacgaggttcttctatatggtatggatgtgttttgagaggtgatgttaacagcatcagcatcgggtctggaacaaatatccaagataactcccttgttcatgtcgcaaaatctaacttgagtgggaaggttttaccaactattatcggaagtaatgttacagtgggtcatagtgctgttttacatggatgtactgttgaggatgaagcgttcgttggtatgggggctaccctattagatggagtttatgttgagaagcatgccatggttga

SEQ ID NO: 15511 - DNA, 586 bp, Gossypium hirsutum
  unsure (1)..(586): unsure at all n locations; Clone ID: LIB3829-027-Q6-K6-B4
canacccgttgcatgggactgggaaacctatgttaaacgcaaaacaactgaaatcccgagaaggctaagacccgtagagtgggatattgatgaaggggaaggaggattggactctgtgtctgtcaattcttccagtgttgctggttgtagtggtggttctggctcggatttaggccttgtgtctttgtctaaaaatttgaaatcggcatccattgattctttatctatgggggaggcaaaattgaccaaatttactttggaggcttctgaagctatcccagatgatataagcaataagaaagaagtttctgggattgagacaaccagtacttccttgacactcgtggcttctgttggctctggtgagccattactcagtttaaagcttggcaaacaaacatactttgaagatgttagtacgggaaccaatgctacggattcatcttattctgccactctgggaacatcatctcctttatctgcaaagagatccaaactgaattgtcgaagcacacatgctgtacgttgccaagtcgaaggttgtaaccttgacctttcttctgctcgagattaccatcggaaacac

SEQ ID NO: 15512 - DNA, 591 bp, Gossypium hirsutum
  unsure (1)..(591): unsure at all n locations; Clone ID: LIB3829-027-Q6-K6-B5
ggttcaagcgtgctggnaaaaactacattaaagtgcctttctttggaactctctcataccttacattggctgtttcccctttctgcatagcatttgctgttgtttgggctgtttaccgcaatgtttcctttgcttggataggtcaagatatactaggaattgctcttataatcacagttctgcaaattgtccatgtacctaatctcaaggtgggaacagttctactcagttgtgccttcttgtatgacatcttttgggtatttgtttcaaaaaagttgttccatgaaagcgtgatgattgtggtaagtaatccgtcttatccaactctagtccatgtgctatatcagaattagaaggttagtctttatactattaaggatattcaaattatgaaaggctagaaagtaatactgatttactcgtgtctattgcataggtagctcgtggggatagaagcggagaggatggcatcccaatgctactgaagatcccacgcatgtttgatccatggggcggttatagcataataggatttggtgacatccttttacctggcctgttgataacattttcactcaggtatgattggct

SEQ ID NO: 15513 - DNA, 587 bp, Gossypium hirsutum
  Clone ID: LIB3829-027-Q6-K6-B6
cactgcagtgcctgctgaagaagagagattggggtgctaaattcaagtggaagggccagctgttgttgctgccacagagtagtcctttgctttctccttctaaatctatggatccatggaattataggagctgcaaatgcatagcatatggatcagtctccatatgaaagtacttgtagagtgggaaatgaaaagaagaaaaagaactgtttggttatgagaaatggtagtaactttctgtttaggtagctttatgttaaaactagcttttattcctgtttcgtcctttgtacatcataatgtcagcttcaacttcgagtctaataaaagcttgttcatctaaaaaaaaaaaaaaaaaaaaaaaaaaaaaaaaaaaaaaaaaaaaaaaaaaaaaaaaaaaaaaaaaaaaaaaagggcggcccccctttttttttttttttaaaaaggaaagcttgatctgaatttggaaaggaaccctctaaaattacactaaaatttgttattttgaaacaaaataagacaaaactcaccaatgcattggggtttataatttgcctatcatgtctaatacagatgtttaagtccca

SEQ ID NO: 15514 - DNA, 608 bp, Gossypium hirsutum
  Clone ID: LIB3829-027-Q6-K6-B7
tagtaactggcatgcacaggttcaacaacagcaccagcaccagcaccagattcagactagattaaggaacaatgttgttggtgggagaccattggggcttccacaatcttcatggcctccacttcaagttcagccccaacagcagaaacaggcacaaaatgggatgagagctatgttccttggtggatctagtggtgtcaaaagggaatcaactggcactggtgtgtttatacctcgcagatatggcaacaccaccaacaccaccactcatgaacctagaaagaaatcaggttgttcaacggtgttactaccagcaaaggttgttcaagctttaaatctcaacttcgatgataccaataaccatgttcaacctcaattcaatcccacttttgcatcaaactatgatgccttggtagcaagaagaaatgcactcttgacacaagcaagaagaaattatagaccagatggaagcttaaacttgcctcaagaatggacttactgaaaatttagtccaagttttctctcaaaatagtgtttgttttgatggaaaaagattagggttagtagcttttatgatagggtatatggtattttggtttatatatata

SEQ ID NO: 15515 - DNA, 584 bp, Gossypium hirsutum
  Clone ID: LIB3829-027-Q6-K6-B8
gaataccactgcaagattagcaagtcattaagctattttgcattcaattccctgacttcagttttacttgttatttagtgatctatatgaaggggctaggatggctatggtgactgatcttgctggaatcaggcaaatcatacaacctttagaagagtctggcacattggttcgcaggagtgatgaagaggtctatactattttagacttttgtttgatcaatctcgatctcttttatgtgtatactttttcaatgaggtgcctgttgtaaaattagcttttgtttcaaatctcaccaaaagaaaaacaaaatggaaggtgaaaaatgctttcattcttttgagtcagagccaggtagaatctgaaaattaaattcttgtctcctttttattcgcacagctacttaaggccctagattcatttgttgttatggaaagggaaggtcaaatcattgcttgtgctgctctttttccattcttcaaggaaaagtgtggagaagttgcttgtattgcagtttctcctgactgtcgaggacaaggacaaggagataaattgctcgattacgtcgagaagaagcatcctct

SEQ ID NO: 15516 - DNA, 587 bp, Gossypium hirsutum
  Clone ID: LIB3829-027-Q6-K6-B9
ttcttgtaaaaatcaaaacccaaattccaaaatggaacaagctttcaaaagaacccaaattctcaccaatcatctgctccaatcgtccccatcatcccaaaccctttcttcaaacgcttgtttaagctactcaccgcctgaactttccgagaactatgcgtttgacattaaggatatgaggaagttgattgaccggcacaacctggaggaacgggattggttgttcgggttgatgaaacaaagcaagttgttcaacccgaaggttaggggagggaaggtgttcgtttcgccggactataaccagtcgatggagcagcaacgggagatgacgttgaaacgaattgagtatttgcttgaaaagggggcgtttaaaggatggttaacggagaaaggggaagatattgagatgaggaaatttgctggctttgaggtttgcagtatctatgatcattccctcttcactaagctcggggttcacttcttcttgtggggaggtgccatccaattttttggtacaaaacatcatcatgacaagtggctgagggacaccgagaattactcgatcaagggttgctttgcaatgacag

SEQ ID NO: 15517 - DNA, 605 bp, Gossypium hirsutum
  unsure (1)..(605): unsure at all n locations; Clone ID: LIB3829-027-Q6-K6-C1
catcaacttagcattcaactgcagtatcattaggacactgtttcgtggtgggnccgatnnatctgtggcagnnaataatatggaagaagtcttaacaaatcccaggctgggttctatattaaccgggatatctttggagctgaaggtgatttcataacatctcctgaagtaagccagatgtttggagagatggttggtgtttgggctatgtgtttatgggaacaaatgggacaaccaaagagggtgaacttggttgagcttggccctggcagaggaactctaatggccgatcttcttcgtggtgcatcaaaatttaaaaattttacggagtcattgcatatacacatggtagaatgtagccctgcattgcaaaaacttcagcaccaaagcttgaaatgcatggatgaagaaaataccagtgaaggtgttgataaaaggtctctaagcacattggctggaacacctgtatcgtggcatgcaacactggaacagtgccgaccataattatagcccatgagttctatgatgcactgccagttcatcaatttcagaggggttctcgtggctggtgtgagaaaatgatagatgtcacggaagattcatcg

SEQ ID NO: 15518 - DNA, 598 bp, Gossypium hirsutum
  unsure (1)..(598): unsure at all n locations; Clone ID: LIB3829-027-Q6-K6-C10
ctcccctgtaggtaagccctttataaaagctgctttctacttcaagnaggccttacaattattacttcctttgaacactagcaatacatcagttatgtccaattataacatgatattcaagattggtgcttacaaatcgttctccgagatatctccgatcgttcagttcgcgaattttacttgtaatcaagcgttactcgaggttttcgaagggtgtaataggcttcatataatcgatttcgatgttggttatggtggacaatgggcttctttgatgcaagaacttgttttaagaaatggtggtgcaccttctatgaaaattactgcctttgcttcaccttcaagtcatgatgatatcgaactcggtttcacaatcgaaaaccttaagcattatgctagtgaaatcaacatggattttgatatcgaaatcatgagccttgaggccttgaattcgggttcttggccgttgcctttgcacttgggcgaaaacgaagcgattgctgttaatctcccgatcggttcattttccaattacccttcaatcttgcccttggtccttcgttntgtcaagcagttatcgcccaagattgttgtctcg

SEQ ID NO: 15519 - DNA, 480 bp, Gossypium hirsutum
  Clone ID: LIB3829-027-Q6-K6-C11
gcagcttagacgtttgaagagagaaggaaagatgacggttgaatctttgatggctaccaaaatagatgctgcagagagtgtggcaagcttagagcgtttgaagatgagaaggaagaagctaacgaaaaagctgaaaagaagaatcaaagacttccagaaattgcagacattggaggttgagctgacatcggagatgagttccccttgaaatagatataatgaataatttaatttcagtgttgagataggtatgcataaggctacgcttaaacattatgccgatacttttgggtggacattttattaagcgttggaatagacttgttgacacatgttatggcgactctttgtataagagttagaaaaacttaagtcaactctttttgaattacactgcctcttttttaaattgtttaaatttatacatttaagtaaccttttttagtatttgcaaaatctaatcatatctcgatttttaag

SEQ ID NO: 15520 - DNA, 286 bp, Gossypium hirsutum
  unsure (1)..(286): unsure at all n locations; Clone ID: LIB3829-027-Q6-K6-C12
cccgggttcgnacccacgccgtccgnaaagtaggaagttgcagcacattttcttccagccttgccttattaataacgaagccctatctctctgtatgattattaagaaggcaaggcgtggaagaaatgttctgaccctagacatatgatattctgtaaagggaaaagtaggaagttgcagatcatctaatttgtgttgttattggtgttgaggtgtgtgttcgtttgtgaaccctgttcatcgacttttaattattccccctcatttagtgcaacattagtcgagc

SEQ ID NO: 15521 - DNA, 601 bp, Gossypium hirsutum
  unsure (1)..(601): unsure at all n locations; Clone ID: LIB3829-027-Q6-K6-C4
gggnactagnggagccgctgccgccaccgacccgcctaagcaaaacacaaaagcaaagcccccgtgatcactgctcttttctcgtcgaattccagttatttcagagctaaaatacgaaacagaaagggaatgggtcacaacaagccccggcgtttcaaaacccataactcttatcggggacagtctagcagaaaccatcaattccaaagggaagatgaatctctcccacatgatcaacctcccgaagaggaacccaatattcctaaagttcaacttgctatgtgggattttggacagtgtgatgcaaaaaggtgcactgggcgcaaacttgcaagatttgggttgttgaaagatttgcgtgtaaatagtggttttggtggcattgttttaagtcctgttggtagtcaatgtgtctcaaaagaagattacaacttaataaagaggaaagggttagctgttgtggattgctcatgggctcgacttagtgatgtaccctttgtgaagctgcggtgtggtgctcctcgcttgttgccatggctagtggctgcaaacccagtaaattatggtcgcccatgtgagctatcatgcgtagaagcattat

SEQ ID NO: 15522 - DNA, 593 bp, Gossypium hirsutum
  unsure (1)..(593): unsure at all n locations; Clone ID: LIB3829-027-Q6-K6-C5
tgcttctccacctccaccagctatccaanagctacgtgctactatccgtgtgctgccaccacaagattgctacacctctaaacttaggaacaatgttcgttcccgtgcttggggagctggaatcagttgtagttatcgtgttgaacgatgctgcattgttaagaaaggaggcggaaccattgatttggagccatgccttacacattcatcaacagtggagcccacccttgctccagttgctgtagaacggacaattactactagggcagcagcttctaatgccttacgacagcaaagatttgtacgggaagttactatacagtacaacctatgcaatgagccttggattaagtatagtatcagtatagttgctgacaagggtctgaagaaacccctttatacatctgctcgtttgaagaagggtgaagttctgtacttggagacacattcgtgcaggtatgagctatgttttactggagagaaaatggtgaaagctacagtagcgtctcaagcacatgaagcagatacagagaagtctcaaaatcaccactcacattcctcaaatggtgaaaagaacgactctgagaacaccc

SEQ ID NO: 15523 - DNA, 578 bp, Gossypium hirsutum
  Clone ID: LIB3829-027-Q6-K6-C6
ccggccaatttcatgctccaaactcctcatgaagaagacatcatcatcaacccccaacttccatcaatcaaatgcttccttcatgcacaccccaagactttcacggtgttgcaccatttctggggaagagatcaatatcatttgctggtatagatcatgtatgtgaagaaggaaatggggaggatgatttatcagatgatggttcacaggcaggagagaagaagagaaggctgaacatggaacaagtgaagacccttgagaagaactttgagttggggaacaagcttgaacctgagagaaaaatgcagctggctagagctcttgggttgcaaccaaggcagattgctatttggttccaaaacagaagagcaaggtggaaaaccaagcaacttgagaaagactatgatctccttaaaaaacagtatgaagctatcaaagctgataatgatgcactccaagctcagaaccaaaagcttcatgctgagatattggcactgaaaggcaaagaaccaacggaatccatcaacctcaacaaggaaacggaaggttcatgtagtaacagaagtgaaaacagctcg

SEQ ID NO: 15524 - DNA, 604 bp, Gossypium hirsutum
  Clone ID: LIB3829-027-Q6-K6-C7
caagttgctttatctaatcttgcaataacgctaaccatgactgtctcggtagctaacggccgtgtcctcatagtcggagcaaccggctttattggtcggttcgtggctgacgccagcttggatgctggtcgacccacttatgttctggtcaggccaagttccggaaaccaatattccaaggacaaagtagccaaagcccttcgggacagaggcgccatactgttgaatggattggcaaatgacaaggagttaatggtgaaactgctgaaagagcaccagattgagatagtaatatcagctctgggtggcgccacaatactagatcagctgtctttggttgaggcaattcactctgccggcacagttaagaggttcttgccgtcggagtttggacacgatgtggaccgagctgatccagtagagcctgggctcaccatgtacaaggaaaagcgtcaggtcaggcgtctgattgaaaagctggagatcccttacacctacatttgttgtaattccattgcttcttggccctaccacaacaataggcatccttccgaggtcattccacccttggatcatttcgaaatctatggagatggcagcgtca

SEQ ID NO: 15525 - DNA, 590 bp, Gossypium hirsutum
  Clone ID: LIB3829-027-Q6-K6-C8
gtgaaactttatcctgatcaacaagctctcttcataacttgcagacactaaacctcagacattgttgcaatcttcaaatgttacccaaaggtaccgatagaacttgaaaaatcttaggtacttggacatcaggaattgccatgaactaacttctatgcctgttgcattgggacaactgtcttttttgcgcaagcttagcatgttcattgtgggaaaggaagatggttgcggcattgatgagttgaaggggttggccctagagggggaattgagcatcaaaggacttcacaacgtgaagagttcaatggaagctagaaatgcaaatttgataaagaagcacaatttaagatcacttagcttatcttggcgattaagcagcaacaagagctctcatcatcaaaatgatgaagagattcttagtgctctccaacctcattcaaacttgaagaagttacgtataattgattaccaaggtttgatgtttccgtattggatgatggatctgcttctaccaaaccttgttgaaatctcactaggatactgtgaaagatgccatcagctaccacctctagggaaattgcgcttcctta

SEQ ID NO: 15526 - DNA, 586 bp, Gossypium hirsutum
  Clone ID: LIB3829-027-Q6-K6-C9
caccctcaagttccagttcacgttccttctccttctgaggatgctgagcaacttcggaaagcttttgaaggctggggtacgaacgagcaattgattatcgacatattggctcacaggaatgcagcacagcgcaattcaattcggaaagtttatggtgaagcttatggggaagatcttctcaagtgtttggagaaggaacttacaagtgatttcgagcgggctgtgctgctttttacgttggaccctgcagagcgagatgctcatctggctaatgaagctacaaagaagttcacatcaagcaattggattctcatggagatagcttgcagtaggtcttcgcatgaactactcaatgtgaaaaaggcgtatcatgctcgttataagaaatcccttgaagaagatgttgctcaccacactaccggagagtaccgcaagcttttggtccctcttgttagcgcattccgatatgagggagaggaggtgaacatgacattggcaaaatctgaggctaagatacttcatgataaaatctcggacaagcattataccgatgaggaggtgattaggattgtatcaacaaggagta

SEQ ID NO: 15527 - DNA, 568 bp, Gossypium hirsutum
  Clone ID: LIB3829-027-Q6-K6-D1
aataactcaaaccaaaggatctcctcttcttggagaaggccctcctgggccttttcgtggcggtggtactagccatcaccatctctaaacttcgtggcaagcggttcaagctccctcctggaccattacccgtgccggtgttcggcaactggctccaagtgggtgatgacttgaaccaccgcaacttgacagatttggccaagaaattcggtgacatatttttacttcgaatgggacagcgtaatctggtggtggtgtcttcacctgagctagccaaagaggtgctccacacgcagggagtggagttcggctcaagaactaggaacgtagtgtttgatatattcacgggtaagggtcaagacatggttttcacggtgtacggagagcactggaggaaaatgaggcggatcatgacggtaccattttttaccaacaaggttgtgcagcagtacaggtttggatgggaggacgaggctgctcgtgtagtggaggacgtgaggaaaaatcccgaggcagccaccaacggaatcgttttgaggaggagattgcagctgatgatgtacaacaa

SEQ ID NO: 15528 - DNA, 581 bp, Gossypium hirsutum
  Clone ID: LIB3829-027-Q6-K6-D10
attttctccactttcttctatattgctctcccttttttaacttccaacaaaaaccaaaaaccccaatttaacgcccccaccccttgttttccttttccatgaccaaattctagcaaaaaaaagaagagagatcatcaagaaatttctgggagtggttcaaatccagctgagagttcatccattaaagggaaattatgggaagaagatccagatgctggtggcatggacgacgagttattagctgttttgggttacaaagttcggtcatcagatatggcggatgtagctcaaaaattggaaatgttggagaaagttatgggtactgctcaagaagatgggatttcacagcttggtgatactgttcattttaatccttcagatctatctggttgggttcaaaatttgttgatcgagttcaacggttcaacaacaacaccagatcccaatttcaacgatgattctgagtacgatcttagagcaataccaggggtcgccgcttacccaccggtgaaatcggatccgggtctagaaaatacccggaaacgagctaaaactgagtcgtcgtcatcatcatcttcaac

SEQ ID NO: 15529 - DNA, 561 bp, Gossypium hirsutum
  Clone ID: LIB3829-027-Q6-K6-D11
ttcgaataattataaaagacctggtagaagcatttcaaccattggggatatccgattggaactcccttttttggattgctcatcctggtggtccagcaatattagatcaggtagaagccaagttagcactgaagccagagaagctacgagccacaaggcacgttctttcagagtatggtaacatgtcaagtgcttgtgttctatttattttggatgagatgaggaagaaatcaagggaagatgggcttcagaccacaggagaagggttggagtggggagtgctctttgggtttggacctggcctcactgttgagactgttgtgctccatagtgttgctgcttaaagttaaacaaacatgctttttaagtaattggtcgtgctccacttggcttgcagttttatcttcttcttttttcctttttagattatttaaatcccatgaatttgtgtgtttattgttaaagactagaggtctttgatggtgtgggcgggaagcttaacgcctattcaattcatgtatcaacttatattaaatttatggcaataataagttcctttgc

SEQ ID NO: 15530 - DNA, 601 bp, Gossypium hirsutum
  unsure (1)..(601): unsure at all n locations; Clone ID: LIB3829-027-Q6-K6-D12
gcgttcggnaataataagaacagcactgctcggctttataattattttcatcacttataaattgctttaatttattaactcttggattatggcttttatcactgtgaatagggtaagtatataacttcacaagcacctgttatttgttgtgcacaaaacaatcactgatagaactggacattcagtgttgtgttcttagaagatcattctaagttttggagatttacgtgcctgtcagcttttgtgatttttgttgtttagttatccttcattgttatttgaaatactgtccttgcataggttgtttatattccttagggacaatagattatgattttaggtcattatgtcattttgatcctttcctgcatgcttaattgagtggcttaataaggaattgctatctttatgcagcttgatctacaatatgcagccgaaacaagtgcccttgaaccacctcatacatatgtaccttgggttgttgtggatgggcaaccactttacgaggtttgtttccttgactatcaaattgattgattatcctaattacttgttcattactcaaatgtgtgattttgatgaacatcgttattgatggttt

SEQ ID NO: 15531 - DNA, 573 bp, Gossypium hirsutum
  unsure (1)..(573): unsure at all n locations; Clone ID: LIB3829-027-Q6-K6-D4
ctcttctaaagcacgtcttcatcagctctctgatgctgataagatagttgttgcatttccagatgatggagcttgngaaacgatttcacaagttgttggaccattttccaacggttatctgcacaaaggttcgtgagggtgacaagaggatagttcgactcaaggagggaaatcccaccggttgtcatgtggttatagttgatgacttagtgcaatctggaggcactctcattgaatgccagaaagttctgtttgctcatggtgcggcaaaggtgagcgcatatgtcactcatggtgttttcccgaagcgttcctgggagcggtttactcagaagaacaacaggtcggagaagggatttgcctacttttggatcacagattcatgcccccagactgtgaaagccattgaaaacacagctccttttgaagttctgagtcttgcaggatcaattgctgatgctctccaaatttaagtccaatctccaagaggcttcatatgaactctttttaagccgaaagtttagaaagtatgtgccaatttcatcttagtatgaaatgacgaaataaatgtat

SEQ ID NO: 15532 - DNA, 583 bp, Gossypium hirsutum
  Clone ID: LIB3829-027-Q6-K6-D5
gcttaactcttgttcatcattccgatccgtggtatcaatgccatgcacccaataacaataaagatcttgcagctattgcgtttgagacagattttcaatggtgttttccttaaagtgaacaaggcaacaatgaacatgcttcatctggtcgaaccttatgtgacttacggataccctaatctcaagagtgtgagggaattgatttacaaaagaggttttgggaagttgaacaaacagagaactgctttgactgacaacgcaatcgtggagcaggctctgggcaagtttggcatcatctgtgtggaagatctcatccatgagatcatgactgtgggacctcattttaaggaggccaacaatttcctctggcccttcaagctcaaggcgcctttgggtggtctgaagaagaagagaaaccactatgttgaaggaggagacgctggcaaccgtgagaattacatcaatgagctaattcggagaatgaattagacgttggttttatttgttaattcagtatttttggtttgttttgaagggtcctgaaatgatttcttttggccttttagaaacagttttgtttaaa

SEQ ID NO: 15533 - DNA, 590 bp, Gossypium hirsutum
  Clone ID: LIB3829-027-Q6-K6-D6
gtggtgccataatgataccaaacgacgagacttcctcaaggagataccaagctcactttacgatcttgtagacaagtgcttaacagtgaacccaagagtaagaattacagcagaggatgctctgaagcatgaattcttggcttcaatacacgaaaacttgagaaagcaaagagctttcaagcaggggctcagctctaactccgggaccaacagcagcaacaatcttttgctgggaggaaggatcagtaaatctttaaaggtttctctttaaaaagcctgatcaacttgcagtttttgggatctattctgctgtaaatgtaaatgcagtaacacatgcgcttacatgtgtcaatgttgtaaccaaaggtggggggggggatagatacttaacctattccttacgttaaacttgaacctttcactacgcgaagaattaagctgtaaaaaaagattgtgattctttttggtcggattctttgtttggcatggaaggggtagatggtgtagatatttgtaaagaaacgattacgtgatagtccatgagagatacaactacactatcagtaggagaaggttcatgtgcaattact

SEQ ID NO: 15534 - DNA, 582 bp, Gossypium hirsutum
  unsure (1)..(582): unsure at all n locations; Clone ID: LIB3829-027-Q6-K6-D7
natcttctgcggttttattttttcacataaagnaaccagtgnattcggnaaacaatttcttgttccattgatagcaattcaagctcctacaagtatcatttcatggatgaagggtgaatatggtatttgggcagcattcttgggactgctagttcgtctcttcttcttcattcctggtgaacttgagttgccatttctagcattactcttggtgattgtggcccctctccatgtaatgaacttaaggggaacacaacaaggcgctatcatttccttggtgattgcagcgtatttggcttaccagcatttctcaggtgctggcagcttgcagagagcatttgaccaaggttcaattattgccactgttggcattgtttgcatcactgttgtctcctgcttgcttttgatatgaatttaatgaagaatcaagacgtcttccaagttattgaagactcgtagaaggagagagtactgtaagaataacatattttccagacctatgttcttgtgttagcatgataagtccattttatgctgagaaaaataagacttctagatgaaattttatatatgttgaatgtg

SEQ ID NO: 15535 - DNA, 580 bp, Gossypium hirsutum
  Clone ID: LIB3829-027-Q6-K6-D8
agccaataaagggttcttaacggcgtcaataaaagaaggcagaaaaagacagccgttaaagcttcgaccagcatcgtccatgtcccaaatcaagaggcactggttcttccttgcaggatccttcaactcccgcgtcgtacaatctacgaaattctctcaaggctcccaatcaaaaccctcttccaatgcaggtccgtttgcaagagatttctttgttttatctccgatcctgaatttgctaagcttcaactctcgaaatcgcaagtttgcatcttaatcaagacgctgccgctccaaaacgcttcgaaacgactccagttagctcatgttgaagccaatggttcaacttttgaggtctcgaaactcaactttactcccaaatcaaatctccccactattgatatctctcatatgaatgcttgcaatggtttactctgtttagttggatctgagaaagatataacatttatgtttgtaatccgattttgggtgaattcatcacaattcaaccgccttataaggacagacaaaggggtagcttttgggggcttggttattcagctatgatgaatcaatacaa

SEQ ID NO: 15536 - DNA, 589 bp, Gossypium hirsutum
  unsure (1)..(589): unsure at all n locations; Clone ID: LIB3829-027-Q6-K6-D9
cagccatgcaacaggnagnattcagctcctcctattatcacccttcaaaccctaacacctccaacccatcccaatttcatcaatcaccttacgcatcagcaccgcctttttccccttccgattaccaaaatcctgatccctcttatgctcctccgccgccaactaccctgaattcgcaaccgtctttcaatcagcatccgatcgcgccaaagtcggctcccgctgccccttctttcccgccttatgattcacctgtctcccagccaccttattaccagccttatgatcagtatcctagctatgtacctcctccaccagactccaaccccaaccctattccgccatactattcaaccccatataatcaaataggatcatcacaatcctctgtccctcctgcttatgacaacccctacgataattccatgaaattggatcaaagcagtagcagttatttcgacgataaattcggagcacgatataaccagagcagatacgatatgggatccgatctctatggtaagcgatatgatagctattcacacttcggtgatgatggtggatacggtgatggggtttatgcttatga

SEQ ID NO: 15537 - DNA, 484 bp, Gossypium hirsutum
  Clone ID: LIB3829-027-Q6-K6-E1
cgtcgctggttgcccgtagccttaaatcaggaaaattcttcctcctctatttagcgtagctcccatgatggaatggactgataatcattataggactcttgcgctccttatctccaaacatgcatggctttacacagagatgcttgttgctgaaactattgtttatcaacaagggaatctgccactcacatgacttgttttggggaacgagaaggaaaatattttgcttattttgaagaggttacttgtgttgaagaagaagctgtgttgtcccagtaagcctttagattcatggaaaaacttggaaaaattgaatctcttcaagctggaaaagccaaggcttagcactttttcaagtagagtgttatttaatgttgtattccatggtcgtttatcttagtcagaacttgaattaggtgttattgaaacaggattttgtagctaccttatgtactagcttctttaatcatgattgttaattatt

SEQ ID NO: 15538 - DNA, 613 bp, Gossypium hirsutum
  Clone ID: LIB3829-027-Q6-K6-E10
ttttaggagaacatctctggtagtagcttcctggctgatctcagcactgtgctcgtcactggagccgctggcagaacaggtcagatagtttacaagaagctgaaagagaggtcggatcagtttgtcgtgagaggactcgttagaactccagaaagcaaggagacaatcggtggagcagatgatgtgtttgttggggatatcagggataccacctctctggttcctgccatgcaaggaattgatgcactcataattcttactagtgctgttcctagaatgaaacctgggtttgatccgacgaaaggcggaaggcctgagttctattttgaagatggagcatatcctgagcaagttgactggattggtcagaaaaaccaaatagatgttgctgaggaggctggagtgaagcaaattgtgttggttgggtccatgggtggaacaaaccctaaccatcccttgaacagcttgggcaatgggaacattttggtctggaagagaaaggctgagcagtatttggctgactctggtgtcccatacacaattatcagggctggaggactgcaagatagagatggtggcatcagagaactacttgtcgggaaggatgatgagc

SEQ ID NO: 15539 - DNA, 606 bp, Gossypium hirsutum
  unsure (1)..(606): unsure at all n locations; Clone ID: LIB3829-027-Q6-K6-E11
gcgttcgcggncgcgtgnnggtccgaaatcaaatccggnatttgcagaatgcaaacaggcatatgctgggagagtccatagggggattgcctatgaaagagcttaagagcttggagagtcgtttatgaaaaaggaattagcagaatccgttccaaaaagaatgagctgttgtttgctgaaattgagtatatgcagaaaagggaaattgacttgcataacaataaccaacttcttcgagccaagatagctgagaacgagaggaagcagcagagcatgaatttgatgcccggaggttcaagtgctaacttcgaggccctacattctcaaccatatgactctcggaactacttccaagtcgatgctttacaacccgccaccaattattataaccctcagctgcagcaagaccagatagctcttcaactagtctaatgttatgggggcgtgcatggttcattgctgctgtttcagttttagtgaagaacatcttagcattgtgtcagatgaaagctactatataaggcaggaatattatgttaactttccttaaatggaggaccctagatctgatcgtctgccatgtttaagatgcgtagagtgtgtaag

SEQ ID NO: 15540 - DNA, 596 bp, Gossypium hirsutum
  unsure (1)..(596): unsure at all n locations; Clone ID: LIB3829-027-Q6-K6-E12
ttctccgnaaaaaaattgccatnaataaatcgcagtggcatggtccccagtagaaagctcgatggatcacatgacatcttgtggcaagatcttcccagattgtctttgctgtcaaaccaagctgtgggtttccagcacctgcgataaaacgtacaagcaagctcacctcagttctttttagtacaaaatgagagtgctaattgatcctcccaagtcgtattttatgttccagtgttggtttatgctaacaagttttaaccttaagctgttctctgcgcttctataaaagcggcggcggctgctgccgccatgacatgctaacttaaaatgtccaatcacagctgaatctcatgcagctgtaattttgttcttcttgcttcctattcatatatgcatagcttagatcctttgaatgtacagtataggatttaactgttttgcacttgggatgaaatcttttgttacctgtacaaagtagaaaaaaagcaaaaattcgttacattcttttgttaccgctaactgaatgcgaacagagattatttttatattttaaaaaaataatctctaatctatccagtcttcaagctggggacttt

SEQ ID NO: 15541 - DNA, 551 bp, Gossypium hirsutum
  Clone ID: LIB3829-027-Q6-K6-E4
ataactaaaattacacatttttctttcttttgatggggcaaaacaaacaagcatcaaagtcatctttgcagtaataagaaaccagataccctatggtttctcatgccacaccggaccatattatgagatcaatcatgatttgtccgggttgatttcataagttattgaaatttgccatacctggctcctactgtacaagtatcttagctcctgctcaagcactcatcaggtggcatctcattgtgcttacgccactttcaccactgaccaatcgcatcccatccttttgagctctatttgctccaagcaatattcaccacttcgtcagcataatgactaggcaaaatcatgccaagtacctgaatacgttggggttctccttgtctctctcaagataatctcgagtaatcaggtcctctattcgctttttaattgccttgaaatcaggcttgaacatgcgacctaactgctcgacacactccataactaactgctggtgacccagaactttcctgctcttcatgatgcgcacaattgaggcatcaatggca

SEQ ID NO: 15542 - DNA, 595 bp, Gossypium hirsutum
  unsure (1)..(595): unsure at all n locations; Clone ID: LIB3829-027-Q6-K6-E5
cacgtggccaaattggntgctgctatgaggcaagattccaagtctcggggacagcttacccgttttactactaccaccaccacttcagctggaaatgattctcttgaacccacatattttggaaatgccaaacgggcattgcaagataagcttttcctcgcaccacctcccattaatggggaatggctgccaaaaagtgctgtctatgcccttgttgatcttatgatcatcatttttggccgtccaaaaggaaatttcaaagagtgtgataaacgaattcagtctggaatacatatcatcaaagaggaactcatcaggcttggtataactgatgatgtgagagaagtggacttgcagcactcggcgatctggatggctggtgtatatttaatgctattgatgcagttccttgagaataaagtggctgtggagcttacacggtctgaatttcttgaagctcaagaggcattgatgcaaatgaagaactggttcattcgctttccaacaattttacaagcttgtgagagcatcatcgaaatgcttagggggcaatattcccattctgttggctgttataatgaagcagcttttcact

SEQ ID NO: 15543 - DNA, 587 bp, Gossypium hirsutum
  unsure (1)..(587): unsure at all n locations; Clone ID: LIB3829-027-Q6-K6-E6
gtttggaagcataagtacagaggaacacacaatnacaccaaagngaagcgcttgtcatggggaggataggtcaagggccttgtgtccgacagtgatgaagaacaattttttatcacaaagagccgagacccttttacatagcttgagggttcgattccccggccttccacaaacagcattggatatgaacaaaattcaatacaataaggatgttgggcagtcaattcttgaaagctactcgagggtgatggagagtttggctttcaacattatggcaaggatagatgatgttctttatgttgatgatgctataaagcaacgtgctgcggcagaaacagtttctcttttcagcaggagcggtttcagtggtcgtccaatccaaaggcgattgtctcctagtcccttctcaattcaacagactccttatgcctctcctttcgcaacacccaccttttgttctccaaccccactcaccggaagtccacgacgagcagcttcctctttgaagagaaatgatattaaggaagaacctgaccggaaatttgaaaaaccgttcgcgagtgaatttgagaaggtgtggtcgtata

SEQ ID NO: 15544 - DNA, 469 bp, Gossypium hirsutum
  Clone ID: LIB3829-027-Q6-K6-E7
ctaagctgaacctgccgggtggctatggcatgcaaagttggcacaggacatcaccgcgcgagctcgggggttgactactgatccaccagcatgtcttaagtcctctgacacttcggggatcaacctgaccatcgatgcccttggtgatcatgctggctactgtctatgaccacacagttgtcttttagcatcatgctatcgcgtacatggaacaccaccatctttagaaggaggaccacccaaatctagtgaaagccgctggcatgaacgagtgaatatccattataacagctgcactctatgctttgagtgctaataagcggagactctctccagactactatgctaattcttcagctaaccatagcctatactccaggccattatggatctttgcttattgatgcctccacatgatttggacaaagcgtgtctggattgggagcgagaaaaattgccgcttcttctg

SEQ ID NO: 15545 - DNA, 588 bp, Gossypium hirsutum
  Clone ID: LIB3829-027-Q6-K6-E9
caaaaggagttgagaaacagcagcataagcagaggcagctgaggaggaggaggcaccaaagcccaaaccaaagaatcctcttgatttgctgcctccaagtaagatggtactggatgactggaagaggctttactctaacacaaagaccaatttccgagaggttgcaattaaaggattctgggacatgtatgatcccgagggatactcactgtggttttgtgactacaagtacaatgaggagaatacagtttcatttgtcacaatgaacaaggttggaggattcctgcagagaatggatttggcccgcaagtatgcatttgggaagatgttggtgatcggtgctaaccctccattcaaggtgaaaggactatggcttttccgtgggcaagagattcctcaatttgtgattgacgagtgctatgacatggaactctacgagtggaagaaggttgacctgtcagatgcagcccagaaggaacgggtgaatcagatgattgaagactgcgagccatttgagggagagcctctcttggatgccaagtgctttaagtgatagaatatgttcttaattttacttttttatatttc

SEQ ID NO: 15546 - DNA, 561 bp, Gossypium hirsutum
  Clone ID: LIB3829-027-Q6-K6-F1
ttgttcctaccttatttccttgctgaatggatggggcctcaattgcctgctttttcggggaaaggtaaaacacatcatactaaacgttgtgtgtggtgaatctgaagtctgacatggatagccttgactgttaaggactggtggaatcactattaaaaagaacatacgaagcatattcaacatgatgaccaaattacgccataccatccctctgatgccgcttttgctgcagaaaccacggtagtatttgttgatcccattgaaaaaaatctcaacaatgccacataagtcaagtggctatatggcagatcctaactttgattatcatgttaccccaccatcgacaccatacattgaacaccagtagcaactataccttcatatgatatctaaacatgctaataaatatcaccatgatagatttcaggatttcaatcaatatgtggaccacatgattgaccattatgacattcctaaagctggtaccattttattaacgcaaaacgaaggtaatcttgtcagtggtttctgaaggaactcatctgtgccatgcaccaaatg

SEQ ID NO: 15547 - DNA, 592 bp, Gossypium hirsutum
  unsure (1)..(592): unsure at all n locations; Clone ID: LIB3829-027-Q6-K6-F10
tcggnatttggttccctgagagcttctatcagggaaaagagggagaagcttctaatttatgactatcttccaaatagaagcctacatgactttttacatgaatcaagatcaggaaagccagttctaaattgggctcgacggcacaaaatcgcattggggatagccaaaggattagcacatcttcatacaggtctcgagatgccgatcacccatgggaatgttaggtccaaaaatgtgcttgtagatgacttctttgtagccaggctcaccgaatatggactcgacaagctaatgattccggctgtggccgatgaaatggttgccctcgcaaagaccgaaggttacaaggcaccggaacttcaaagcatgaagaaatgcaacaccagaactgacgtttatgcatttgggatactgttattggagattttgatcggcaagaagcctgggaaaaatgcaagaagcaacgatgttggggatttgccttcgattgtgaaagcagcagttttggaagagacaacaatggaggttttcgacgtagaagtgttgaaaggtatccgaagtccgatggaagacgggttagttcaagcactaa

SEQ ID NO: 15548 - DNA, 577 bp, Gossypium hirsutum
  unsure (1)..(577): unsure at all n locations; Clone ID: LIB3829-027-Q6-K6-F11
ggnanatagtgtggttcgatttaaatctttgacactcaagttcgagttatcgccaaatggtgcaccctaattggtcaaattcgtgggttctattggggagtcgtgaaagcttgttttacattctcccaaatggcagcctcccaactcgcgttacagaaaattggctcgtcaccttgtcatcttccatgggaggctcggctaaagatagccaaaggtgttgcacgagggctagcttatctccatgacaagaaacacgtacatgccaatttgaagccgagcaatatcttgttaggccccgacatggaaccgaagatcggagacttcggtctcgaaaggcttgtaacatgcgacacaagtaccaaagtcggggtctcggctcgaaacttcggtagcaaaaggtcgacggcatcgagagacagcttccaagacctaactggaccaagtccgagtccaagcccaagctcattcggattatcaccgtaccgagcccctgaatctctcaggagcctcaagcctaaccccaagtgggacgtttacgcgtttggtgtcattctgctagagcttctaacggggaaag

SEQ ID NO: 15549 - DNA, 584 bp, Gossypium hirsutum
  Clone ID: LIB3829-027-Q6-K6-F12
accttctggaccgtggccgcgcctcttaaggatctggaacccggtactatggacggcgtaagatccggtccgtttggacaaattttccgacccgataacttcgttttcgggcaatccggagctggaaataattgggctaagggtcattacaccgaaggagccgagcttattgattccgttctagacgtagtcagaaaagaagctgagaattgtgattgcttacaagggtttcaggtatgccattctttgggaggaggaactggatctggaatgggaacattgctgatatccaagatcagggaagagtacccggatcgaacgatgcttacgttttcggtattcccatctcctaaggtttctgatactgtggttgagccgtacaatgcaacactctcggttcatcagctggtggaaaatgcggatgaatgtatggttcttgataatgaagctctctatgatatatgtttccgtaccctcaagctcactacacccagttttggagacctcaaccatttgatttctgccaccatgagtggggttacgtgctgccttcgcttccctggtcagctgaactcggacctccg

SEQ ID NO: 15550 - DNA, 577 bp, Gossypium hirsutum
  unsure (1)..(577): unsure at all n locations; Clone ID: LIB3829-027-Q6-K6-F4
nganaaatngaagtgttctttgtgtccctgattctgtggaattactcccaacgcagccagatttgtctagacctcgcattcgtattgtggttcatgaaggaaggaatcatgaagtccgtgaacttgtgaaaaatgctgggcttgagattcattcattgaagcgtgttcgcataggtggtttcagacttccagcagatctcgggatagggaagcatatcgagctaaaacagagcgaccttcgcacaatgggttggaagagttaaagaagtcgctgcttcatggggagactgttggaagagtcatagaagtcactgcatcattggaagcatctgcattttgcttgggtctcccatgttgggagaggcttcaatcagatattacacatcccttgtgtcgtggatttgtctagagcatcggaaatgatcccttaatggcaacagtataagggacttcatgtcatttctcatcgaaatggatcaatgttgccagaaaatccccgccccttagtttggaaaagccataattctcgaattacaattgtgtgaaaatcatttattcatagatggaagttcccagt

SEQ ID NO: 15551 - DNA, 593 bp, Gossypium hirsutum
  Clone ID: LIB3829-027-Q6-K6-F5
gcgttcgcttgacctcccctcgaaagcctgtagattgtcgcttgtttcaactgcttttaattcggctgctgaatccgatgctgtttgggaaagcttcttgccatcccaataccaggaattaattccctcatcgctctctttctcgtccaagaaacaactttatcttagcctctgtgaaaatccccttctcattgaagctggacgaaagagtttttggctcgaaagagtgagtgggaagaaatgttacatgctgtcacccagggacctctccattatatggagtgacaccccagattattggagatgggtgtctatacccgaggccaggtttgacgaggtagcagagcttctgcacgtttgctggtttgaaatccgtggaaggattagtatctccatgctttcacccatgacgcactacaaggcttaccttgttttccaagcagataatgtttatgggtttgactatcatccagtgaatcttagtgttggagttgttggcactgaaggtagcaagagaagtgcctatttgcaaccaaaaaaagacggagacggctatattcgcagataagagaggaacaacctacaccgggtga

SEQ ID NO: 15552 - DNA, 575 bp, Gossypium hirsutum
  Clone ID: LIB3829-027-Q6-K6-F6
cagtgtcgagccacccaactcactattaacaatggcgcatcatcgtggctccgaccctgaaaccgaaccaaacacgcaactttacaacccataccaagacttgaaccttcaagttcccataaccaacctgtacaagctcccaacctctccggagttcctctttcctgaggaatccctccaccaacgccgctcttggggagaaaatctgaccttttacaccggttccgcttatttaggtggctctgtatccggcgcagccgtcgggctcttctcggttctcaagaacttcgagcaaggcgatactttgaagctgaagatcaaccggatcttgaatagttcgggtcatacgggccggacatggggaaaccggatcggggtggtgggcttgatttatgcggggctggagagtggagtcgtggcggtgactgatcgtgatgatgtctggagcagcgtggctgcgggtctggccaccggagcggtttgtcgtgcggcgagaggggtgaggtccgcggcggtggcgggtgctctgggtgggttggcggcgggagcagtggtcgctgggaagcaagttttga

SEQ ID NO: 15553 - DNA, 588 bp, Gossypium hirsutum
  unsure (1)..(588): unsure at all n locations; Clone ID: LIB3829-027-Q6-K6-F7
gnaaaataacaccattcttcattccttattctataacaaacatgtcatctgccttgcttgcaattgaacttggttttatgggtcccaattattcaatttcaactgcttgtgctacctccaattattgcttttatgctgctgctaatcacatccgtcgaggtgaggctgaattgatgattgctggtggaactgaggctgcaatcattcctattgggctgggaggttttgttgcctgtagggcattgtctcaaagaaatgatgatcctcgaactgcttcaagaccatgggacaaagatcgagatggctttgtaatgggtgaaggtgctggtgttttggtaatggaaagcttggaacatgcaatgaaaagaggtgcaccaattattgctgagtatttgggtggagctgttaattgtgatgctcatcacatgactgatccaagagctgatggttttggggtgtcttcatgcattgagagaagtcttgaagatgctggtgtgtcccctgaggaggttaactacatcaatgcacatgcaacttctactcttgctggtgacctagctgagatcaatgctattaaaaaggtattca

SEQ ID NO: 15554 - DNA, 585 bp, Gossypium hirsutum
  unsure (1)..(585): unsure at all n locations; Clone ID: LIB3829-027-Q6-K6-F8
aagtaggcgcggnaagaccacaggnatggatgaatagcggtcttccatggataccaccgaagaaggtctcgaccttagcaacttgacggaaacattaagtggtgccttcggggatgaatcggatggcttgtctgttacactagggatcgctgcagctaccggattaggcttattagcattttcagagatagaaacaatacttcaagttttaggctctgctgctattattcagcttctaagcaagaagcttctgtttgcagaggaccgaaagaaaacacttcaacaagtcgatgaattcttaagcacaaaagtggctccgaacgagcttgtcgacgatataaagcaaataggggtggccttaataccaacaactacaactagtaaggctcttccggcacctacagaggcaaacccagagcctaaaagcgaagtatcagcagaaacgcctacccaaattaatgcagtacctgaatcagaatccaaagcgaaaggaagctcagggactccgagaccgctttcaccgtatccttcggtaatgccagttttcaatttacgcttgatactgttgtaacattaatgctttgt

SEQ ID NO: 15555 - DNA, 588 bp, Gossypium hirsutum
  Clone ID: LIB3829-027-Q6-K6-F9
caagcgagcattttccttacagtttgttttcttgtgactaattgatatggctagctcaatgtcccttaagcttacatgtgtggtggtgttttgcatggtggtgggtgcacccctggctcaggggccataagttgtggtcaaatcacaagcgccctcgcaccctgcattgcttacttgaaagggaatggtgctggttctgctcccccagcttgctgcaacggcatcagatctctcaactctgccgccaaaacaacaccagaccggcaagcagcttgcagctgcatcaaaagtgcggccaccggcatttctggcatcaactatagcactgcagccggactcccatgcaagtgcggtatcaacatcccttacaagatcagcccttccactgactgcaaaagcattaagtgaagtgtggtcatggaagttgggatcagctaatggaagggaaatagtgatgtcgacagaataaaaatgaatgttaaaaatccatagcggtactattcattgttggagttatcctagttttagagttagtggtaatgtacaaggtcgcatatgcgactatataatactatctttacctactct

SEQ ID NO: 15556 - DNA, 605 bp, Gossypium hirsutum
  Clone ID: LIB3829-027-Q6-K6-G1
cgttttgaagcttgtgccaaagcaaaacagttaaacgagtcgtcttgacatcatctgccgcagctgtgtctatcaacacactggatgggacagatctcgtcatgacagagaaagactggaccgatatcgagttcttatcatcagcaaagccaccaacttgggggtaccctgcatccaagacgttggctgaaaaggcagcttggaaatttgctgaagaaaacaacattgatctcattacagttatcccttctctcatgactggtccttcccttaccccaattgtccccagcagcataggccttgctacatctttgatttcaggcaatgaattcctcataaatgctttgaaaggaatgcagatgctgtcaggttcgatctctatcacacatgtggaagacgaatgccgagcccatgtttttctggctgaaaaagaatctgcatcgggtcgatatatatgcagtgctgtcaataccagtgtgccagaactagcaaagttcctcaacaaaagataccctgacttcaaagtccctaccgattttggagatttcccctccaaacccaagttgatcatttcctcagagaagcttattagcgaaggattcagc

SEQ ID NO: 15557 - DNA, 607 bp, Gossypium hirsutum
  Clone ID: LIB3829-027-Q6-K6-G10
gcgttctccatgttgcagtgcatagacggattgaagcatttatttgcttcagtgctgcaatgctgtgatattgatttgtacaagcaatcaagaggtcttgttgatcctgaacttcttgcaagagagaccgttttttagtgtaagtgaaatagaagcactttatgagcttttcaagaagataagcagtgctgttatagatgatgggctgatcaacaaggaggagttccaattggcgttattcaaaacaaacaaaaaggagagtttgtttgctgatcgggtatttgacttgtttgatacaaagcataatggaattctaggtttcgaagagtttgctcgtgctctctctgtcttccatccaaatgcgcccattgacgataagattgatttctcttttcaactatacgatctcaagcagcaaggttttattgagaggcaggaggtgaagcaaatggtagtggctaccctagctgaatctggcatgaacctttcagatgatgttatagaaagtataattgacaagacctttgaggaagctgatacaaaacatgacgggaggatcgacaaggaagagtggagaagccttgttttgcgacatccatcccttctg

SEQ ID NO: 15558 - DNA, 599 bp, Gossypium hirsutum
  unsure (1)..(599): unsure at all n locations; Clone ID: LIB3829-027-Q6-K6-G11
gcgttcggttgtttcagaaaactganacacaaagcctgctgttaaaattcctctggaacaggcacagggtttgaaatttgtgccaaggtttcaattgggaatctcataaatccggacgatggtatatggaactcaaagaaaaagcttcagaaatatcttcacttgggtttactgtgatttggctaccaccacccacagagtctgtgtcacctgaaggatacatgccgaaggacttgtataatctaaactccagatatggaactattgatgagctgaaggaacttgtaaaaagcctccatgaagttggtatgaaagttctcggtgatgttgtattgaatcatcgttgtgcacactttaaaaatcagaatggtgtatggaatatatttggtggtcgcttaaattgggatgatcgtgcagtggttgcagatgatcctcattttcagggacggggcaacaaaagtagtggagataacttccatgctgctccaaacattgatcattcccaagagtttgtgaggaaggatctgaaagaatggcttggctggctgagggaagaaattggttatcatggatggaggctggattttgtcagaggattt

SEQ ID NO: 15559 - DNA, 435 bp, Gossypium hirsutum
  Clone ID: LIB3829-027-Q6-K6-G12
gcgttcggccctttaataacggtacaccccacttatcatctaatgatgctgagacgggtaactacttccaccagcagagggatatggtgcaagggaatggggcacaacatgggtccccttcaattaaatgagattccttcttgaggcagcgctggaggtatttgtcccttagatgttgggtggcggaatccttcccagagtggcgtctctcaggcaaatcattcttggctttggtttggttaaggggttatcatatggggaagtatgtggtctttggttttatccacacactgctgttcctcctattgatccctttgtagaaagataatgtgtggtatcgtgctacctacaaaagtgtataatttgaaacaacttatattagaacttgtgaactgaagcagaacttacgtatgactaaagagttttagcatttaa

SEQ ID NO: 15560 - DNA, 184 bp, Gossypium hirsutum
  unsure (1)..(184): unsure at all n locations; Clone ID: LIB3829-027-Q6-K6-G2
cgccgactcggtgccacctcattggctgcattttggcgtgtattggcttgacaagtatggcttgnaaaaaaaaaaaaaaaaaaaaaaaaaaaaaaaaaaaaaaaaagggcgttaggcagctacgcctctcacgatctttttggactaatatactgcccgttacgcgactgaacctgctccacta

SEQ ID NO: 15561 - DNA, 600 bp, Gossypium hirsutum
  unsure (1)..(600): unsure at all n locations; Clone ID: LIB3829-027-Q6-K6-G4
cttaaacttcatccgaagttgccaatttgggctgctgggattttactcgtcacctcatcttcacacctgcatagcttcgtaatccaacaagctcgaaccatggaccgacacttatcgaaatcattcgaaatcccaccagcaagtctgtccatctttggcatcctaacaacgctctcaggcctagtcttgtatgaacgcctcttcgttccgctcgcaagacggttcactggacacccttcgggcgtcacgtgtttacaacgaatgggaatcggttttgtcatcaacatcgtggccacgatcgtttcatcgttcatcgagatcaaaaggaaatccgtcgcagcccatcacaacttgctggatgatcccaaagccatagttcccatcagtgtgttctggttagtccctcaattctgcctccacggcatagccgaagttttcatgtcagttggacacttggagttcctgtacgaccagtcgccggaaagcatgcgaagcacggcggcagccctgtattggacagccatttccatggggaattacattgggacattgctggtttcgcttgttcataaatacacnaggtgaaacagtaactggttg

SEQ ID NO: 15562 - DNA, 586 bp, Gossypium hirsutum
  Clone ID: LIB3829-027-Q6-K6-G5
cggccgcgtggggcaacaccaactccaactccaacaacaacgagtacagcaacgcaaacaatgctgccgataaaaggttcaagactttgcctgccgccgagacactcccgagaaagaggtgcttggtggatacatctttgtttgcaacaatgacacaatgcaagaagatcttaagcgccagctatttggtttaccgccaagatacagggactctgttcgggcaatcacacctggcttgccattgtttctctataactacaccactcatcagttgcatggtatttttgaggcagcaagttttgggggttctaacattgatccaactgcttgggaagacaaaaagtgtaaaggcgagtcgaggtttcctgctcaggtgaggatccgtataaggaaggtatgcaaggcattggaagaggatgcttttaggccagtcttgcaccactatgatggtcccaagttccgtcttgagctgtcagttcctgagactttggatctaatggacctttgtgaacaagcaggctccccataaacaaaatgctagccgagtgcaaatgtagtagtagtagggtttgtgatgcacgtttcc

SEQ ID NO: 15563 - DNA, 578 bp, Gossypium hirsutum
  Clone ID: LIB3829-027-Q6-K6-G6
gttctggcggccctcaaacccagagaactgggaagaatggttccaaggaactgctgatgctgtgaggcaatttgtgtgggtttttgaggatgccaaagccaaggatgtggagcatgtattgatattgtccggagatcatctttaccgagcagactatatggattttgttcagaagcatattgactcaaatgctgatatcacagtctcatgtttaccaatggacgacagccgtgcatcggattatggattgatgaagatagatggaacaggacgaattgtccagtttgccgagaaaccaaaggccctaatcttaaagcaatgcaagttgatacctccatattaggactatcagctcaagatgctgcaagatatccgtacattgcatcaatgggtgtgtatgtgtttaaaactagtgtcttgttaaagcttctaactcgaagctatccctcatgcaatgattttggctctgagattattccgtctgctgtgaaggaacacaaagtccatgcatatttgttcagtgactattgggaagacattggaacaataaaatctttctttgatgctaatttagcgct

SEQ ID NO: 15564 - DNA, 595 bp, Gossypium hirsutum
  unsure (1)..(595): unsure at all n locations; Clone ID: LIB3829-027-Q6-K6-G7
tcgtttttcctttcgaaaggnataatcaataacaaaaanacaaatccaatcaatcagagcaaaatccaaatgggtaatcttttctgttgtgtacaagttgaccagtctacagtagccattaaggagagatttggcaggtttgaggatgttcttgaacctggatgccattgcctaccttggtttcttggaagtcaacttgctggccacctgtcgctaagattgcagcagttggatgttcgttgtgaaaccaagactaaggacaatgtatttgttaatgttgttgcatctattcaataccgggcactggcagacaaggcaagtgatgccttttacaagctgacaaacacaaggacacaaattcaagcctatgtgtttgatgttattagagcaagtgttccgaagctaaatctggatgatgtttttgaacaaaagactgaaattgctaaagctgttgaagaagaacttgagaaggctatgtctgcctatgggtatgagattgttcaaacacttattgtggacatagaacctgacgagcatgtgaagcgtgcgatgaatgaaattaatgccgctgcaaggctgagagtggcagctaatg

SEQ ID NO: 15565 - DNA, 549 bp, Gossypium hirsutum
  unsure (1)..(549): unsure at all n locations; Clone ID: LIB3829-027-Q6-K6-G8
gtcgacccagcgtccgggcaaacacttgtccttgntgagnaaattaattacattcaatcactacagcgtcaggtcgagttcctatcaatgaagcttgaagcagttaattcaggaataaaccctgccattgaagtatttcctcgtaaagattatggccaacaagcgtttgatgctactggtatggcattcggttcgcaagtgataagggaatacagtggtggcacatcaccagagtggttgcacattggcagtgctttcgaaaggacaacataatcgggtaaagggaatccccttgcaattaaataagagcattaaattaatttgcagtgcttccagcttgggtcggccaaagagactatatttcctttgtcaacataaaggcatggagcctccattgcagaaagctagagttagtatttgatgaaaatgttcattgttgtgttttggagagtgtgttcctttactccctatatgtcaaacgttaagctgaagggaatctcctagaatgattagtttttgttcttgtacaagaaatttgattgttcanaa

SEQ ID NO: 15566 - DNA, 581 bp, Gossypium hirsutum
  unsure (1)..(581): unsure at all n locations; Clone ID: LIB3829-027-Q6-K6-G9
atttgtcaaactcgaatatcacatcatggcccgtcaaacaaacgctaggaagtcgaccggtgngaaaatctccaaggaagcagctagccacgaaggccgcccgtaagtctgctccggcgaccggcggagtgaagaagcctcaccgtttcaggccaggaaccgtggctttgagagagatccgtaagtaccagaagagcaccgaattgttgatcaggaagcttcctttccagaggctggtgagggaaatcgctcaagatttcaagactgatttaaggttccaaagcagcgccgtcgctgctcttcaagaagctgcggaggcttatctcgtcggattgtttgaagacactaacctttgtgcaattcatgctaagagggttactatcatgcccaaggatatccagcttgctaggaggatcagaggtgaaagagcttagatcgtttgtatttacttgattgattgtgaaattaggttagatctagtgtttggtatccgtttttggaatttgctttttcgcaaaagtccttatgtaaacggtcgtctttctatggagttctcatattttcgtttaaaatttggctct

SEQ ID NO: 15567 - DNA, 563 bp, Gossypium hirsutum
  unsure (1)..(563): unsure at all n locations; Clone ID: LIB3829-027-Q6-K6-H1
gtacattaatgcatagnagttaaaacctccaaaacattaattcttgtctctgccacattattacaagtatttgcatgtttagaacataaattaaggctgaaagctaatggttcttagagctgtaagactgatttaatgaagaatatacacttcactaacaatgggttgagcataaattcaaccgcagataaattttagctacttctttcagtaatcgactcttctctagttctctagtttcattttagctacttctttcagtaatacactggaggatacaaggaagtagaaatgagagccgtgatcccagcatagtctagcctgagcatgatatatgataggcgctcagaggggcaagaaagaaggtggcatgtgttgctagccagcaagcagaacattgcaccacccaagaaggcaaagaaaggccaccgtgttattggtctcaccatcaggggtgctattatgtttgccacttcctccttcacactttgcttaagtcaagaccttgcgagaaggaatgagatttgcctggacaagaaggagatgggtcttatgatcgttct

SEQ ID NO: 15568 - DNA, 572 bp, Gossypium hirsutum
  Clone ID: LIB3829-027-Q6-K6-H10
cggccgcgtgggggagaggaagatagagttgaagaggatagagaacaaaataaatagacaagttacatttgcaaagagaagaatgggttgctcaagaaagcttatgagctctcagttttatgtgatgctgaggttgctcttattattttctctaaccgtggcaagctctatgagttttgtagcagttctagcatgctcaaaacacttgatagataccagaaatgcagttatggtgcagtggaagttagcaagccagccaaggagcttgagagcagctacagggagtacctaaaactgaaagctagatatgaggaactgcaacgaactcagaggaatttccttggtgaagacttgggtccattgaactcaaaggagcttgagcagcttgagcatcaactagagtcatccttgaaacatgtccgctccaccaagacccaatatatgcttgaccagctttctgaacttcagaataaggaacaaatgctaatggaaactaacagggccttgtcaataaagcttgaagaagttagtgccagaaaccagttccgagtatcatgggaaggtggtgagca

SEQ ID NO: 15569 - DNA, 589 bp, Gossypium hirsutum
  unsure (1)..(589): unsure at all n locations; Clone ID: LIB3829-027-Q6-K6-H11
ggnacttccttttcttggtatttgatttttgctatcttcagctgatgtggtgttacgttttatcctgcgcatcctcatttaataagaaagtttgcaactttgcttngaaaagactccaaagcttttctcactcactgagttcgctgttcatctcatttttgcttgtttcagaaacggggcagcggtcaaggcgaagaagaaaggagacatggcgaccaaagtatcgaacttttcggatctgatacaacgtgttgcagcttcttgtttattgcacccgctcgccgccggtaggcaagaatccggcgaagctgacgccctgactgacgatattattgaggaggaccctgatgaagaagaatactacgagtataacaattcgagtgaggatgaagagaaagaaaatggggtgaagggggcggaaaagtcgaggagaatagcgacagtttggaacaataacggagagaaaacgaaggaaatggtgacgttaatggaggaggttttcgaggcggtggcggaaatgaagaaggcttacgtaaggttacaagaggcgcattgtccgtgggacccggagaggatgagggcggctgac

SEQ ID NO: 15570 - DNA, 309 bp, Gossypium hirsutum
  unsure (1)..(309): unsure at all n locations; Clone ID: LIB3829-027-Q6-K6-H12
gcgttcgtataacanaaaatggnaatgcttgtgcttgcaattttgcatgtacaaagcttactgcttcttttgtttctttattcttcttcactgataagaattggagcttaaaaacccataaccaaacgaaggaatttttctttctttttaaactctggatctacaatgagggaagcaggctctctttttttttttggtggtgggtattgaatggtagagacaatgaggcaattttcttccatgttcaatgggttagcaaggtcaataagtgggaaaatttcanggaatggtgatgggagagaagctgct

SEQ ID NO: 15571 - DNA, 503 bp, Gossypium hirsutum
  unsure (1)..(503): unsure at all n locations; Clone ID: LIB3829-027-Q6-K6-H4
gccaaaggagtctactctccgaatgaactcaggttactctattcgaactagcacagttgcagctgcttaaatcacaccacaaaggaaataaacaaaaacatatctaccatatatatatatgaatagttcaaaaaaaaaaaaaagaagagaagggaaaggtggtggagatcatcaatgaagaaagggccaaggagagaggagaggatgaagaaatctatattttgagtggtttgttatcccctttataaaacatactgctatagttctagctctgtgaatgttatatctatatgaggatatgaaattagcctgcccaggatctactctatgatatggctccctttttctttttggggttttttgggggttaattactgatttttgttttgggttcttaagaaatgttaatgcatcacgaagaatgatgagaactgttttttttcatttctattttcagtatcactaatgtttaatngaaaatgacataaatggaacttactgaa

SEQ ID NO: 15572 - DNA, 589 bp, Gossypium hirsutum
  Clone ID: LIB3829-027-Q6-K6-H5
gtcacccctggttctgacgatggcaacgtaagtacgaatctgaaggcaacacagctcaggcttgggcttcctggatcacagaactcctagaaagaaatcctgagctttgcttgttaagctctgctcaacttggtgagaaaaccccttttccctttgcatccttcaagtgatggccactgctttacatctcaaaagactgattttcaggcaacaaaagagcttctctgatgcaatggatggtctcttagaggggaattccctttctaattcgaaagtcgatgtgatgttgacacccaggccttcgacaaacttcgggactgaaatctggctctatgcttgagaaccttgaggttcaaccaacaagggccaaagaggtcacgatacacacaatgtggtaaaggactcgtctcatgctgctaatgagacgaggcccaatcataatgcatctgctaacaataacagtggagcacctgcttccaaggcacaggttgtaggttggcctcctattagatcgtctataaagaactcattggccacctgttccaaaaacactgatgaagtagcatggcaaagacatggcctgatgctc

SEQ ID NO: 15573 - DNA, 578 bp, Gossypium hirsutum
  Clone ID: LIB3829-027-Q6-K6-H6
gttctaatatcttcaaagtatgggtttcctggttttgacttgacagctactaccatgggtcagatgagtttcacctcaatgctgggtgcggctaaccaacagctccctggtttggaacttgggttgtctcaagaaggtcattttggggttctaaatcctcaagccttgacccagatttatcagcagatggggcaggcgagagtgcatcaacaacagcaacatcagaatcaccaccaccaccaccaccaccaccagcagcagccccctgctaaagatgattccgaaggatcaggcgagtaaagttatcaactttgggagcaagattaaaaagtagcatggctgagagaggatgacctccttttcttgtaatgcttttcaatattgtataattggagagaaaaaaaaatagtgagaaaaaatggataatttgcctctcagaaacctatggtgactggatggatatttttgcccccttctttctgcgctgcatcacccggatttccattacagaggtggagctttgcacagcctagtagcttggttttgggcttatcttctggtttgattcagaggtgtgt

SEQ ID NO: 15574 - DNA, 563 bp, Gossypium hirsutum
  unsure (1)..(563): unsure at all n locations; Clone ID: LIB3829-027-Q6-K6-H7
acgcgnacggccccctttttttttttttttgcaaaccaaagctaaaatgttagaaatcaagattaaaagtctttgacaaacttagaatactataaatagctgatgaagtaaaatcagacgaggaacgtggggaatcattagcctgtgctttttcaaaatacagatctagtaatcttccggttcttcttcgtcttcaataccttctgccccaacttcctcatagtctttctctagagcagcaagatcttcacgggcttccgagaattcaccttcctccattccttcacctacataccagtgaacgaatgctctcttggcatacatgagatcaaatttgtggtcgattcgagcaaaaacctcggccacagcggtgttattgctgatcatacacactgcacgttgtactttagcaagatcaccccctggtaccaccgtcggtggctgatagttgatgccgcacttgaaaccggtagggcaccagtctacaaactgaactgcccgcttagttttgatggtagcaacagcggcattgacatcctttggtacaacatccccacggtaca

SEQ ID NO: 15575 - DNA, 580 bp, Gossypium hirsutum
  unsure (1)..(580): unsure at all n locations; Clone ID: LIB3829-027-Q6-K6-H8
cacttttcctgncattctatagatattgatctgagttacctacttattctagacatttgactggatttcatctgtagttcttttaaaaatcttagtacttcattgcctattaccaggtgattatagtaaaaattcggcatcccaaaacctagtatgttagcagttagtttaagttattcatgaatgcataattttcttattatatactctatctctatcccttgcttgattcttttcaggttgcaaaggaagcatctgacatggtgttagcagatgataacttcagcactatagttgctgcagttggtgagggcagatccatttacaacaatatgaaggcttttataaggtacatgatatcctccaacattggtgaggttgcttctatatttttgacttctgcattggggattccagaaggcatgatacctgttcagcttctgtgggttaatcttgttactgatggacctccagcaactgctctagggttcaatccccctgacaaagatataatgatgaagcctccaagacgaagtgacgactcactaatcactgcttggatcttgttccgctacctggt

SEQ ID NO: 15576 - DNA, 583 bp, Gossypium hirsutum
  unsure (1)..(583): unsure at all n locations; Clone ID: LIB3829-027-Q6-K6-H9
gccgtattgcttcccccatgtactctctcgatttctctctttaatgaatctccaaatcgaaatttaagggccataaaatacacaagggttactaattaaattaatcttcagcgaatatgttggtttatcaggatcttcttacaggtgatgagctcctctcggactctttcccatacaaagaaatcgagaatggaatgttatgggaagtcgagggaaagtgggttgttcaaggagctgtcaatgtagatattggggctaacccttctgcagaaggtggtgatgatgatgaaggtgttgacgatcaagccgtcaaggttgtggacatcgtcgacactttcagacttcaggagcaacctgcttttgacaagaagcagtttgtgaccttcatgaagaggtacatcaagaacttgacacccaaattagagcctgaaaagcaagagtctttcaagaagaacatcgagggggctactaaatttttgatgtcgaagcttaaagatctccaattttttgtgggtgagagcatgcatgatgatggtagcctagtgtttgcatactacaagnacggtgccaccgatccaacctt

SEQ ID NO: 15577 - DNA, 591 bp, Gossypium hirsutum
  Clone ID: LIB3829-028-Q6-K6-A1
ttaaaaataagaaaaagtcatacgcaatgagcactgccggtcaggttattcgttgcaaagctgcggtggcatgggaggccgggaagccactatctatagaagaagtggaagtggcaccaccccaaaaacatgaagtccgtattaagattctcttcactgctttatgtcacactgatgtatactactgggagtgtaagggttacactcctctgtttcctcgtatacttggtcatgaagcctcagggatcgtggagagtgtgggtgagggtgtgaatgatttgaaacctggggatcatgtgcttcctatcttcaccggagaatgcaaagaatgtcgccactgtctgtcagaagaaagcaataacatgtgcgaactgcttaggatcaactgcgaccgaggtgttatgcttgctgatgggaaaaccagattttccatcaacggcaagcctatctaccactttgttggaacctcgacttttagccaatatactgtcgtccatgttggccaggttgccaagatcagtccaaccgccccgcttgataaagtctgtcccattagctgtgggatatgtacaggttttggggccactgtaa

SEQ ID NO: 15578 - DNA, 579 bp, Gossypium hirsutum
  unsure (1)..(579): unsure at all n locations; Clone ID: LIB3829-028-Q6-K6-A10
caaatgtgagaatgaagctgaagtattgaaccagacgtccagnaacaatctgtcctggctaagcactatgcctcagnncaggccaaatggaaaaagctgaggaagttctgaaggcaatggaaggggacaacataaaagagaatcgttgggtttacaggtttttgcttcctctgtatgctggtcttggaaaggctgatgaagtagaaagaatttggaagatctgtgattcaaaaccccgctttgaagagtatctggctggtattgaagcttggggaaagttaggtaaaattgaaaaatcagaggaaattttcgaaaggctgttaaaaacatcaaaaaagcttcctgcaagatattatacccatctcttgaaggtatactcaaaccataagatgctcgaaaaagggaaggatcttgttaagcgaatggctggtaatgggtgccagattggcccattcacttgggatgctcttgtgaagcttcatgtggaagcaggggatgtggaaaaggctgactcaatcttgcagaaggcatgccagcaaaatgaaattaagcccatgtttactactttcatggttgtga

SEQ ID NO: 15579 - DNA, 584 bp, Gossypium hirsutum
  unsure (1)..(584): unsure at all n locations; Clone ID: LIB3829-028-Q6-K6-A11
gnaaaacatataatataatagttttgtcaatttgaaacatggcgacgacagggcagccaaaacgacaaggacaacagcagcagcagcaacaacaacaaaataaaacgacggagaagagaaagccggtgtttgtgaaagtagatcagctaaaaccagggacaaaaggccacaccttagtcgccaaggtattgtcctctaacatggtccttcaaaaggtcgagccgcttctcgaaatctccgccaaacccgcatcgctgagtgccttgtaggagacgagaccggcactgtcctcttcactgctcgtaatgagcaagttgacttgatgaagcccgatgacactgtaattcttcgtaatgcgaagatcgatatgtttaagggttctatgaggctggctgtcgacaaatggggccgcatcgaggtcactgaccctgccaactttgttgttaaagaggataacaatctatcgcttgtcgagtatgagttggttagtgtgcttgaaaatgacgagattgctgagacctaagctgctggataccgaaagagttcttatggattgacctgatgattctggtttacccttcata

SEQ ID NO: 15580 - DNA, 588 bp, Gossypium hirsutum
  unsure (1)..(588): unsure at all n locations; Clone ID: LIB3829-028-Q6-K6-A12
gtttaagggatttttttcattcgtttcttctcacgctcgattaccttacaaaaagataaaatgaccaagtgttacccaactgtgagcgaggaataccagaagtcagttgaaaaggccaagaggaagctcagaggtctcatcgctgagaagaactgtgctccactcatgctccgtttagcgtggcactcagctggaacttttgatgttaagaccaagaccggaggtccattcggaaccatgaagcatcctgctgagctcgcacatgctgctaacaacggcctagatatcgccgtcagacttctcgagccgatcaaggagcagttccctaacctcacctacgctgacttctatcagcttgctggtgtcgttgccgttgagattactggtggacctgaaattcccttccatcccggaagagaggacaagcctcacccccctcctgagggccgtcttcctgatgctaccaagggttctgatcacttgaggcaggtgtttagtgctcaaatgggtctcagtgaccagcacattgttgctctttctggtggccacactctgggaaggtgccacaagnagaggtccgggtttgag

SEQ ID NO: 15581 - DNA, 579 bp, Gossypium hirsutum
  unsure (1)..(579): unsure at all n locations; Clone ID: LIB3829-028-Q6-K6-A4
tttgcagtgttaaagnaagaccatgcaagagtgattgacacatcctatatcttcaaattttggatgcacctatctatagaaaaccatctttgaataacttgtgcaagtccgtactgggatatgaagttcgaaagcctggtgctgctcataattgtctagatgatgcatgtgctgcaatgaaactagttcttgctaagctagagcgtggtgaaattaccctggttccagatgtatctcaacctgaaagggagaagctactactccacagaataccagtctatgttcatagagaagaaatttccaaagtcattcctggagctgttgcgattgaagtaaagccaactaaaaagcttcaaggtcgccattactctgcaattgctgtctttagtagtcctcaagaagcaaaccaagcatatgaaaatatggaaggcaatgaagaaaaggattcgcatggactaccacagaaacttgttagctttcagtttggcgatggatcaactgctagtttatacatccgtaaaatggcacaggaagattctcaccgtgaagttttgtcgaataaaagacattcgagggcga

SEQ ID NO: 15582 - DNA, 582 bp, Gossypium hirsutum
  unsure (1)..(582): unsure at all n locations; Clone ID: LIB3829-028-Q6-K6-A5
cggccgcgtgggttctactccttcattctgctctctgcacataacgaggaagaacttcgcaagcacgccctccaggtatggttcttcctgttcttttctatttgtttcgtgtggaagaaagaaagaagagaagacaaaaaacagaaagtggtaagatgcaacngaaaaaacaaaacaaagaaaagttaatcaccttccccaaaaatcccccttcgatcctttgctttttatttcttttcaatcgttttctagatataaaaaaatgtcacctttttacaaaaaaacaattggctttatatagccgaaaaaatagaaaaaagccattctctaaaaactgtcctccctttttacattttcattgtatttttctactattgttcgtggccgaggtttgttgtctgctgcaggaagaacgtgctggagcgcgggacaacgtgtgtgacgtgcaagggcgacgtgcgggagcagctgcggcgatctgctgcttagggtttctgtgacttcaggccaattgggccttgtaattgggttgggattggcccaagttttattgggtttgattgtatttaatttgggctgtgt

SEQ ID NO: 15583 - DNA, 593 bp, Gossypium hirsutum
  unsure (1)..(593): unsure at all n locations; Clone ID: LIB3829-028-Q6-K6-A6
gtttagggttttttttcattcgtttgtttctcacgcatcgcattaccttgacaaagagnaaaatatgaccaagtgtctacccaactgttgtagcgaagcaattaccagaacagtcatgttgaacaaagggccaaggagggaagacacagcaggtgctcatacgctgtagaagaactgtgctacagtcatgctccgtttagcgtggcactcagctggaacttttgatgttaagaccaagaccggaggtgcattctgaaccatgaagcatactgctgagctcgtacatgctgttaacaacgaggctaaatatagacgatagacttcttgagcctatcaaggatcagttacctaatctgacctacactgacttttatcatcttgctggtgtcgttgtcgttgagattactggtggacctgaaattcccttacatcccggaagataggacatgcctcacccccctactgagggccgtcttgctgatgctaccaagggttctgatcacttgaggcaggtgtttagtgctcaaatgggtcttattgaccaaaacattgttcgctctttctggtggtcacactctgagaaggtgccacaa

SEQ ID NO: 15584 - DNA, 591 bp, Gossypium hirsutum
  unsure (1)..(591): unsure at all n locations; Clone ID: LIB3829-028-Q6-K6-A7
ncttattccgcctaaanaggaaaaactaagcaacaacagttattggcgttactcgagaactagtttggaaagatggcctcaagcaaagttatttccttatggttcatgtgttaatgattttggggtttcgagaagtgatattgatatctgtcttgcacttaatgaggatattaacaacaaatctgaaatcttgttaaagttggcggatattttgcagttggataatcttcagaatgtgcaggcactgactcgtgctagagtccccatagtaaagcttatggatccggtgactggaatttcctgtgatatatgcataaacaatgtattggctgtagtaaatacaaagcttctaagggattatgcgcagatagatgcaagattacggcagttggcatttattgtgaaacactgggctaaatccagaggagtgaatgaaacttatcgcggaactttatctagctatgcgtatgttttgatgtgcatccatttcttacagcaaaggagaccggctatccttccatgcttgcaggggatggagaaaacctacaatatcaccgtggataatatcgagtgtgcttactttgaccaaat

SEQ ID NO: 15585 - DNA, 586 bp, Gossypium hirsutum
  Clone ID: LIB3829-028-Q6-K6-A8
ctttcatcccttgttttccttcaacccaaacaaaacctaatctttttgaaaaatggcaccaaagctgaaaaaagccagccgagaagaagccagccgaggagaagaaagccgtagctgagaaagccccggcagagaagaagcctaaggctggtaaaaagcttcccaaggaaggcggagcggctgccggagacaagaagaagaagagagttaagaagagcgtcgagacctacaagatctacatcttcaaggtcctgaagcaagttcaccctgacatcgggatctctagcaaagctatggggatcatgaacagtttcatcaacgatatcttcgagaagcttgctcaggaagcctctaggctcgcgaggtacaacaagaaacccaccatcacttccagggaaatccagaccgctgttaggcttgtacttcccggtgagcttgccaagcacgccgtttctgaaggtaccaaggccgtgaccaagtttacttcatcttgaaaaggctattagttgatctgtagttggggttagggttaggaggttgctttttaaattagatcggtgtggtttttatgtttatttttctgaaa

SEQ ID NO: 15586 - DNA, 589 bp, Gossypium hirsutum
  unsure (1)..(589): unsure at all n locations; Clone ID: LIB3829-028-Q6-K6-A9
gtttaatccaaggaaggattgaacaagtagagagaccgctngagaactccccaaccagaacggctccgtcgtttacaacggagatctgaataagtctaactctaaccctaaccccatctctaaccctttcgtcgcctccaagaagtcccgcgagagcgaacgacgtcgtagaaggcgcaagcagaagaagaataagagtaagaatacctcccaccaagaaaatgacgccgcagacggtcccgtttccgaagccggtgacagcgacgctgccgaagatggaaagaagaattccgatcagcagcaggtaatggaagaagttcaggtagagtacgttcctgaaaaagctgagttagatgatggcattgatgaggaatttaggaaggtttttgaaaaattcagcttctgggaagctgctggttctgaggagactgacaagaaggacgagtctactcaagatgctgatgcaaagaagggggctgattctgattcaggagaggaggagcaggataatccacagaaaganaaaggtggcctatcaaataagaagaagaagctgcaaaggcggatgaaaattgctgagttaaaacag

SEQ ID NO: 15587 - DNA, 605 bp, Gossypium hirsutum
  Clone ID: LIB3829-028-Q6-K6-B1
ggcttcgactcccaattttgggatcacattctgcctccaagcctccgtttccgtgtctttccattcctctcttactaatctttccttaaaatctgttgagacttctaaacaacagtcatatagaatagctgcaatgtcaaaggcagagagtagtagcagcgaccaagtgaaacttgatatctctttgagccccagagttaactctgtgaagccttcaaagacagtggctataactgatcatgcaactgctcttgcacaagctggtgtccctgtcattcgattggctgctggagagcctgattttgatacaccagccatcatagctgaggctgggataaatgctattcgtgaaggttacacaaggtacactcccaatgcaggtactttggaacttcgtacggcaatttgtcataagctaaaagaggagaatggaatctcttattcgcatgatcaaattgtggtcagtaatggtgctaaacagagtatccttcaagcagttcttgcagtttgttctcctggggatgaggtaataattcctgctccatattgggtgagttacccggaaatggcaaggctggctgacgcaacacctattattcttccga

SEQ ID NO: 15588 - DNA, 615 bp, Gossypium hirsutum
  unsure (1)..(615): unsure at all n locations; Clone ID: LIB3829-028-Q6-K6-B10
ctgccgccatcttcactgctggcacctgaactctaccagttctccccttcatttcacatatcttgatctgaactgctccattgtaactggatggctgttgcagcatctaagggactctttaatagtgaatttcatgngaaataagatgatggaaaggaaatcttctggaagaagacgtgtctttgtgcagactgaaacaggctctgttcttggtatagagttagataggagtgacaatgcccatactgtgaaaaggaaactacagattgctcttaatgttccaatagaggagaggtctctcatatttggggatgtagtgctgaagaatgatctaagtactgtcagaaatgattctccacttcttctcacgaaaaactttatgcacagaagctcatctacaccatgtctctcacctactggaaaggatgtacagcagagagatcagagtggtcccattgagatattagtatgttcagatcacttttccaggataagaaaacttgtaagaaaaattgtggaagcaatgaagtttgggattgatcccatccctgtttgtggaggtctaggcggtgcctactattttcgggattgccagggtgaaaactgtgcaattgt

SEQ ID NO: 15589 - DNA, 592 bp, Gossypium hirsutum
  Clone ID: LIB3829-028-Q6-K6-B11
gcgttcgattatctcgaccggttcttatcaagccaaccctaccgcaaaataagacatgggttcttcgacttattgctatctcttgcgtctctttggctgccaagatgaacagaacagatttctctctcgccgagtttcagggcgatggaggtttcatgtttgatgcacgaacaatagagaggatggaatttttaatattgggagcactaaaatggcggatgcgttcaattactcctttctcttttatctcctttttcattccatttttgaagctcaaagaccctgcattaaggcaagccctcaaagcccgagctgttgaaatcatcttcaaagctcaaactgtaacaaagcttttagagttcaagccatcgataattgcagcgtcggcatttctctttgcctcccatgaactgttcccattgcaattcccctgctatcacaaagcaattcccagagctgctcttcaccgaactctactttgtcccgaactgtcgaggaaatattccacttctccgaagaaggacgagaatgttaaggtgcctttggctttgtttggtggatctggaaactatgcatctgcactgtaccttgc

SEQ ID NO: 15590 - DNA, 532 bp, Gossypium hirsutum
  unsure (1)..(532): unsure at all n locations; Clone ID: LIB3829-028-Q6-K6-B12
gntttttctctcatttgaacgatgtctacggctggtgaagctgcttgttcttacgctgctttgattctctatgatgatggaattcccatcaccgctngagaaaattgcaacaattgttaaagctgcaaatgtttcggttgaatcttattggccaagcttgtttgcaaagcttttcgaaaagtgcaacattgaggatcttataaccaatgttggtgctgctggtgctggtgctccagttgccgcagctgcacctgttgctgctggcggtggtggtggtgccgctgctccacctcctgctgaggaaaagaagaaggaagaaccagaggaagagagtgatgacgatatgggattcagtttgtttgattagaagttcctttcagtgcttgatttggttgattactgttttaatgcattaaagctgtgacagtagttgttgaggtttcttggtattattattatttatctgcttttgagtaaaaactttctttgagttgtatgtttgaatcttctatatataaaagttttctagacc

SEQ ID NO: 15591 - DNA, 586 bp, Gossypium hirsutum
  Clone ID: LIB3829-028-Q6-K6-B2
ctggctgcatgtatgtcaaggctggtcagtttgagaaagctgaggcatgtcttgagaacttagagaaagaaatatgcctcgtcagcgcgaggcttaccattatctgattagcttgtatgccggtacttcgaatcgagatgaggtttatcggctatgggaagatctgaaacagcgttatcctactgttaacaatgcaagttatcttattatggttcaggcacttgctaatctaaaggatttcaagggtttgaagaaatgttttgaggagtgggacactagttgctcttcgtatgataggaggttggtaactagtaccatccgtggttttctatcgggtgacatgcttgaggaagcggaagtcgttctggataatgctatgaagagaagtaaaggtccttatactaaggctcgagagtatttcatggtttacttcttaaggaaatgtcgctttgacatggctttgaagcatatggaagcagcggtttctgaggtcaaggactggagccctgtgaatcccgaaaccatgactgctttttttgattatttcatgaatgagggtgatgtcaaggccgccgaggagttctgc

SEQ ID NO: 15592 - DNA, 91 bp, Gossypium hirsutum
  Clone ID: LIB3829-028-Q6-K6-B3
aaaaaaaaacctccccccaacaaagagggtgttaaaaacttgtgtgggtggtggggggggccccccccaacaaggagaaaaattttttttt

SEQ ID NO: 15593 - DNA, 593 bp, Gossypium hirsutum
  unsure (1)..(593): unsure at all n locations; Clone ID: LIB3829-028-Q6-K6-B4
gaactgcaagngccaaaaacaaatcttgagtgcaaacttgggatacgcgaggcaattcgccagttggattcacttagttcagtagggagcattgaaggctctgttattgctccagaggctctgtttaccatgaacatatattttgtgcaaagtgcgagttacgtgaggcttttccagataatgatatagtactttgtgatggaacatgcaaccgggccttccaccaaaagtgcctggatcctccactggacactgaacatatacctccgggagatcagggctggttttgcaaattttgtgaatgtaagatggaaattatagaagcaatgaatgcacatatcggcacccatttctctgttgacagccattggcaggatattttcaaagatgaagctgctttccctgatgatgcgaatgcatcactaaatccaggggatgaatggccttcagatgattctgaagatgatgattatgatccagagaggagggagaacagctgcaggatcagtggaacagccactgatggtgatgaatcggatgaaacagacaattcaaccagtttaagttggtctgtggatagtgaagatctttct

SEQ ID NO: 15594 - DNA, 589 bp, Gossypium hirsutum
  Clone ID: LIB3829-028-Q6-K6-B5
gaaaagacatgatggatcgcaaaaatttcaggagacagtttgaagaatgtttacaagtcattcgtgactgattatccaattgtctccattgaagatccatttgatcaggatgattgggagcactatgcaaaaatgacaagtgaaattggtgaacaagtgcagattgttggtgatgatctccttgtcacaaattctaagcgtgtggagaaagcaattaaggagaagacctgcaatgctcttttattgaaggtgaatcaaattggttctgtaactgaaagtattgaagctgtaaaaatgtctaaatctgccggttggggagtcatggcaagccaccgcagtggtgaaaccgaggatactttcatagcagacctttcagttgggttggcaacaggccaaatcaagaccggcgcaccgtgcagatcagaacgtcttgccaagtacaaccagcttctgaggattgaagaagagcttggagctgctgcagtttacgcaggagcaaagatcagagcaccagtagaaccatattgatggtttctttcttatgttgcaatcggcttttcattgtcttttgctctttgccttaaaacta

SEQ ID NO: 15595 - DNA, 585 bp, Gossypium hirsutum
  unsure (1)..(585): unsure at all n locations; Clone ID: LIB3829-028-Q6-K6-B6
aaaagttgtggnanaaaaaatattacgtttgggaagcgagaagtgcgagaaatgagcggagcaggaaagaagtagtagatgtggctttcaaagcaggaaagagcattgattgggaagggatggcgaagcttttggtctccgatgaggctcgcaaagagttcgccactcttcgtcgcactttcgatgaagttaactccactttacagaccaagttcagccaggaacctgagcctatcgattgggaatattatagaaaaggaatcggctcgcgattggtggatatgtacaaagaggcttatgagagtaagttttttttctgtcatggttgagttttcattctatactatttcctagttgccccctttattcttagatctgttgtagggttcctaaaagcataaaaatggtctacttacctcatgtttgaagtcttcacatggttgcagtttcctcgatttgtgaattgaattaactgttgtttaagctgtgcttcctgttatgagatgataattttatgagtcggatgatgatatggtcaccttgactagctacaatgttcctttttcgtttttattgtctcaaaat

SEQ ID NO: 15596 - DNA, 608 bp, Gossypium hirsutum
  unsure (1)..(608): unsure at all n locations; Clone ID: LIB3829-028-Q6-K6-B7
cggccgcgtgggtctcattccaggnaagagctattcctcccttattacatgcaaggctgtaatagctattctttaatggaccataagaatggttattatgggtgtcaccaaataataaaagaaaagttatacacaattttatccccacttaaaatagtgaacaaacccaacataaaatcatggaggaaattagaaataaaagaaggagcaaccgaaaatagcaatgccagagcacaacttgtcggaaaaataaaaaaaaaaacttaacgagccatttcgagtccttaaaaaagcccaattgcagaatccatatttatgttgtcgatgttttgacttctttccaagccgagttaataggcctaaacactttctttcctaagacaggaaggaaagtcttgatcaaataggcaagacaggatggcaacagttccattgccagttggagttttagtggaaattactctttcttaccttacaaaatcagctttcaatccaacaggaatagcaggttacaaggtaatctctcctgtgagcaaacaaagaagaccataaaatcagcatcttcctcaaacacaaacatgcaatcatcaaaaaacggtcgattatct

SEQ ID NO: 15597 - DNA, 463 bp, Gossypium hirsutum
  unsure (1)..(463): unsure at all n locations; Clone ID: LIB3829-028-Q6-K6-B8
cgtattacttaactccggnanacttgcttttaagctatgattcctctgcaaactcagtgtcgttgcactcaaacaattgaaatggagctatgaagtccgaaagagctcaaatggttagatttatccaaaaaaaaaaaagttctaatgatagctagtattgtatatatattatatatatatcagaaattagcagggaagtagaggagaggcctcaccatatatatatatcttttggtttccatgtgttctatttagccgacttcagatggaaaccttcgatttctaaggactggagacatgaaatctcagtatgctgttattatatatatatgttatatactaactcggagtcattcaatcaaaatactcggtttgaggttgattgattcatattgtaaaatcatagaacaaactatgatgattcaaactattatatgaagtcttggcttcttttgtttctatt

SEQ ID NO: 15598 - DNA, 586 bp, Gossypium hirsutum
  Clone ID: LIB3829-028-Q6-K6-B9
ctggtttcagacacttcctaaatccctttttcgtcgatttccctcatttccagttattcaagctcttaacctgatccgataatcccagattgtgatgcaagaggtttctattgaaatagagaatccggaaggtggatcagaaggtatcagtcgaatgagacaaccgcaagagccactgatacgtggacttcccgatgatatcgcgcttttatgctaggctagagtccctcgagaatatcatactgtcctgaagtttgtttctaggagatggagggatttggtgcatggagaagggttgcatgctcatcgtaaaaagcataatttatatgaaacttggatttatgctttatgtcgagacaagtttgagcaggtttgctgttatgtattggatcccaattcttcgagaagatcttggaagcaaatgcgggagcttccgtctcgcagcttgctgagaaaaggtgtaggttttgaagtgttggggaagagactttacttgatgggtggctgccgatggtctgaagatgctactgatgagacctactgttacgatgcttcgaaaaactcttggactgaagctaatccctta

SEQ ID NO: 15599 - DNA, 181 bp, Gossypium hirsutum
  unsure (1)..(181): unsure at all n locations; Clone ID: LIB3829-028-Q6-K6-C1
caaaaccatgtctcagnctgttgtgctcaagttggcatgtcatgccaaggatgtgttggagccgtgaagagagttctgggngaaaatggaaggtgtnggaatcatatgaagtagatttggagcaacagaaagtgactgtngagggcaacgtccagcctgatgctgtgctgcagacagtgtc

SEQ ID NO: 15600 - DNA, 409 bp, Gossypium hirsutum
  unsure (1)..(409): unsure at all n locations; Clone ID: LIB3829-028-Q6-K6-C10
gtggacccanccggcccaaccccgcaaagtcggcggacttcgcggtggtttcgactaggaagtactatccgaggccgccgccagtagagccagaggattgtcatagtgactgtgattcatcatcgtcggtggttgatgatggggatatcgcgttgtcttcttgtcggaaaactttgcctttcgatctcaattttccacccttggatgaagatggaagatctccagtgtactgctttatgtctttgatcgcgatgccggtgatgaatgatgatgatcgattattggatctctttttcttttttaaaaaatgttagctttttttaagcggaaaaaaaatatgagacatggttaagatgaaatggtcttaatctccctatgcgtatgaaattgaatccctttgatttttatc

SEQ ID NO: 15601 - DNA, 566 bp, Gossypium hirsutum
  unsure (1)..(566): unsure at all n locations; Clone ID: LIB3829-028-Q6-K6-C11
cccagcgtccngattgcttgatctttcaggaggatgcatgcctcttacccgtgttcctgctgagtatcaaaagatttcggaagacctctttatgtggccgagtacggagcactcaaacttgttaatcttttcaaaaagagggtgacacattggcaattgacggaaaagtcataagaaattcgtttaccttagaaactggaaagcaaacccgagtgcacctcctttggttctaacaaggaaagacaagaaagggaagggtattcacgaggaaatcacagatgtcactgcaggtgctggctcatctgacgagttctccgatgaggaaagagtggtagttgacgaacgggatcagaggaagactgacgataatcttgagcaattcaaatacgagttgcaggaaattcttgtgagttattcctgcaggattttcttgggttgtttcgaagaaatatatcagcaacggtataagaagacattggactatagaaagctcagtgtggagaagctagaggagttgtttgacaaggtgagagatgttgtagtcttgcatgaagaaccagtaagca

SEQ ID NO: 15602 - DNA, 599 bp, Gossypium hirsutum
  unsure (1)..(599): unsure at all n locations; Clone ID: LIB3829-028-Q6-K6-C12
ccgnaatcgattctccaccccaccccaccctctccctcccaacatcaacagaagctgccagcgaatcaaacctccagttcccttctcgccgaagatctcctgtcctccgacgacaatggttgcagccaagaagaccaagaagacccatgagagcattaacaacagattggctctcgttatggaaagtgggaaatacactttgggttacaaaactgttgtcaaatctctcagaagctccaaaggtaagttgattattattgccaacaactgccctcctcttaggaagtcggagatcgagtattatgccatgttgtgcaaagttggagttcaccactacaatggaagctgaaaatgatgctgtaggccaagaacttcagaaacaactggaggctgctgtgaaggaactgaaacaggttcaggagttattcagtcaagcagcagataattgtctcaacttgaagaaaccagattaaattcatttccttgaacaatccctccttccatgtttaattttattgtctttatattcgtttaatcctaggattctaaaggtttatttatgtacttaaaaagttagtacaaaatgttccatctgggca

SEQ ID NO: 15603 - DNA, 589 bp, Gossypium hirsutum
  unsure (1)..(589): unsure at all n locations; Clone ID: LIB3829-028-Q6-K6-C2
ctttatctagtcaatcagtctgagggaccaaagccttggngtgaggggaaatcatacagagaaggaatctagcagttctagaagttctggtaaaagtagttcggaagaggacagccatagagagaaggaacctcctagaaattgttcagattgcttgcatagcccctcagacaatagacaattaagtggcgatgactgtcccttggtaccaccaaaatcctcacctgaaatgactgtaaatggatcttaagttattttggagaatcatcatgcgcagtgtcacttgttatcttgtttgttgtattcaactcaaggatgtgcttggtgactgaagggtctcggtacgggctaccaaagaactggattcagagaaaaaatcaagaagctgatgagaagaaatttcggattgtttgtcggagggagggaacggatgatcaccatataaattggaagtgaagggctgggaaaattgtactgaattatatatgcaaaagccaagtctaccaggcctttctgatgctttgagctgagctttggactttctgcttttagcctcaccaccaaactgttgcttctttagaacattacc

SEQ ID NO: 15604 - DNA, 410 bp, Gossypium hirsutum
  Clone ID: LIB3829-028-Q6-K6-C4
caacctctcagggtgggtcgctaatgcatatagtggtggatgcgagtgggctgagtttggaagcagtgactggtccttcacgtatggagcttgcagaagggatctacatgcaccatggtttgaggatagaggctggggaaatgaagaactttcagctggtcttatagcagcacaggctgtttcagcgctgcaaatcacagaggacgcagaagtagtagacaccatcgtgcttgacagaatgttgagaggctagcctagcattttgctgttgtatttgccactttccatgttgcttgctgtctttttatcttttattcataaatctgaataatggatctgtatatatatgtgatgactttgtcacgcatctggttcttgttgcttctttaaatattaaactttgttgcacc

SEQ ID NO: 15605 - DNA, 575 bp, Gossypium hirsutum
  unsure (1)..(575): unsure at all n locations; Clone ID: LIB3829-028-Q6-K6-C5
ctcggnagttatgacagnanatggtccccaattatatatggttgaaccatctggcatctcctatagatattttggtgctgcaattgggaagggaaagcaagctgccaaaacggaaattgaaaagttgaagctgtcagaaatgacctgcagggaaggggttattgaagtagccaaaatcatctacaaagtacatgatgaagcgaaggacaaggcctttgaactggaaatgagttgggtctgtgatgagtcaaagcaacaacatcaaaaggttcctgatgaccttttagaggaagccaaggttgcagctaggactgcattggaagaaatggatgctgactaatgattttaccggagacagaatcatcttgttgtcttatgtatttcgatcttcaccaagttcccaatgttatggaccgtcaaaattaaaaaaggagtgagtgcctgattaaacagggtctttctaagatcatatgagcagcaggcatttggatgagatcatggattcaaaaaaccttggaactgtactgtagattttttaggcatcacgtagactttgccagtggcaactactgtga

SEQ ID NO: 15606 - DNA, 603 bp, Gossypium hirsutum
  unsure (1)..(603): unsure at all n locations; Clone ID: LIB3829-028-Q6-K6-C6
gtcgaccccgcgtccgccctttctctttaacccaccaaaacccataattgattccagnaaaagccccatagttccagtgataaaaaggaacaaagattcttcttcatcgtcgtcatcatcatcatccatgggttgttctgcatcaagacccaacactaatatcatcaccaaaccccagaattcttcacagtcttccacttctttagaatccatggcctcttcccactcttccccaccgcccgtttctcgtgctttgtctctcccgacgccgcttgttcaccatccgccgttgagaaaaggcgacaccaaccacttggtttcgttaacatccactacttatggttccctttcactcatcgacgtccaaaagcctgttatcgacgatacccaaagtttatccgaccaagattcgccggttcatggtggtcaaactgactcgttgtcacctgactcggttatcaacacttgggaactcatggatggactcgatgatgatgatgatgtggggcatgatttcgatctgggtaagcctaaatccaaaccttcgtttaatactattattaaacaatcattaacaaaaccgttatggaaacatttatctga

SEQ ID NO: 15607 - DNA, 608 bp, Gossypium hirsutum
  unsure (1)..(608): unsure at all n locations; Clone ID: LIB3829-028-Q6-K6-C7
ctggtctgtggcttttgcatgcctcaattcattgcctttgggtttgcaaatgaggaagccttgttgntgaaaagaaagacacaaacaaaggagcttggtctaaattagaagaccagaagctcacggattacattctaaaacatggtgaagggctgcttcgttgtggaaaaagttgtcgactgagatgggtaaactacctgcggcctgaccttaaacgaggcaattttggtgaagatgaagaggaccttattatcaaactccatgctctccttggaaataggtggtcactaatagcaggaagattgccaggtaggaccgacaacgaagtgaagaatcactggaatattcacttaagaaagaaacttttgatgatgggaattgacccaaacaatcgtcgttcgcttctatctcctacattaaccaaatccaatgcatccaacgactccagttctgcatgccaaccctttaatccagcaactgcttcggagactatcagcagtacttgtttacccgacctcaatctggatcttaccatcgcccctcccctttcccatcaaaacttggcacttaattaattntaagtctataatgtgatatttccatcaaaa

SEQ ID NO: 15608 - DNA, 578 bp, Gossypium hirsutum
  unsure (1)..(578): unsure at all n locations; Clone ID: LIB3829-028-Q6-K6-C8
gcgttcgctccctctcctccccttttcttccgccgaagggccaccatccataccctcaactgccgtcgtggccagtggccgctgttgtgngaaaatgagcttttcagccctccttttgaagcccttttgaaggctagaccttcggcaactataagaaacagaggaagaaggctctccgtccttttgtcaaatccgattgcagcgacggagaaggccctccgacgacgcgattgagaggattcaggttctatcgcggagatggtcgtacggaggaagccaggcgtgggcactgcagcacgagggaaccctgagtttccagaaacatcacctgcccaggctacctgggccaatctgcctttgggcctctggaattgggtctgttttaggttctcagtaactgggtcgggtttcaattgggttaggaatttgtatttagggctaggatcaggccttagtcttatttgtgatgtgggttttataatttgggcttcaatttatatttaggtttgtatttatggactgtgaacaattttaatttttatttctggtttataatttatattttggtttttattttt

SEQ ID NO: 15609 - DNA, 607 bp, Gossypium hirsutum
  Clone ID: LIB3829-028-Q6-K6-C9
gtcgacccagcgtccgtagtgataacgatgagtggcaagggaccgatgattctggcaacaacgaagctgagttctcagatgaagatgaggactctgttgttgaatcacctgtatgtgacgaggattttgctcatcatcatagcaaggaaaacggcttgtgtgttcttgatgaggatattgcagacgaaatttgtgataaccaaagttcagattttgctatcaaagattcagaaacatatggtggaaagttgtttagaaactgtggttctgatctcatggatcaggtgcatgggaacaccttgaacgatgtctcccgaggagaaagagaagtccaagatgactcatgcacatcatctgatacagggggtgcttcacaagaaacccatgtccctgctgacaacttcaatggtggtaaccgtggatatgtcttggaaccatgttatcccaaaggatgggataccagatatccaacttgccaaacgaatttcagagatgattcatgatattagagatgaaaaaaataaataaaagagcagttttggattaaatcataggagtttttcccttggctgattgaattctcatcaatcaatcattcacgtataat

SEQ ID NO: 15610 - DNA, 597 bp, Gossypium hirsutum
  unsure (1)..(597): unsure at all n locations; Clone ID: LIB3829-028-Q6-K6-D1
ggnaaattagtgacagccaattatcatcaaagtgcgaagccctaatagttttttttaagtcaatggattctgcaacgaacccgaatatcatcaagaaggatccagtaccagttacagtttcagcaccatcgtccacgggtatccagcaaggagttggtgagtcgccgtcgtcttctacttccccagcagcaccgagtcggtacgagtcacaaaagcgtcgagactggaacacgttcttgcagtacttgaagaaccataagccgccattgactctggctcgttgcagcggcgcacacgtgatcgagttcttgaagtacctcgaccagttcgggaaaaccaaggttcacatgacgggttgtccttatttcggacacccgaacccgcctggtccttgctcttgtccactcaagcaagcgtggggtagcctcgacgcgctgatcggacggctgagagctgcttacgaagagagcgggggacgaccggaatcgaacccgtttgcggcaagggctgtgaggatttatttgagggaagtgagggaaggacaggctagagctagagggataccttatgagaaaaagaacgaaaaagccttctgtc

SEQ ID NO: 15611 - DNA, 607 bp, Gossypium hirsutum
  unsure (1)..(607): unsure at all n locations; Clone ID: LIB3829-028-Q6-K6-D10
tcggcttactggtcatacagccaacaacaaattgggnaacaatggcatgtcgaccggcacctgttcaggttacttggattggctatcccaatactactggtttgcctacaattgattaccgaataactgattcacttgcagatcctcctggtacaaggcagaagcatgtcgaggagttagttcgacttccggaatgcttcctttgctatactccttccccagaggctggacttgtttcaccaactcctgctctttccaatggcttcattacattcgggagctttaataacctggcaaagataacacccaaggtactgcaagtttgggcgaggatattatgtgctgttccaaactcccgtcttgtggtaaaatgcaagccattttgttgtgacagtgttaggcagaaatttcttacaacattggagcagctgggtttagaatctctccgtgttgatctcctccctcttattctcctgaatcatgatcatatgcaagcttattctcttatggatatcagtttggacacttttccatatgctggaacaacaacgacctgtgaatctttatacatgggagtgccatgtgttaccatggctggttcagtaca

SEQ ID NO: 15612 - DNA, 601 bp, Gossypium hirsutum
  Clone ID: LIB3829-028-Q6-K6-D11
atcgaaaaagctgcgacccatgagggaattaagttcaaaacttgtcctcaacatctctgtcggtgaaagcggtgatcgtctcacccgtgccgctaaggtcttggaacaactcagtggtcaaacccctgtcttctccaaggctaggtacactgtgagatcttttggaatcaggcgtaatgaaaagattgcttgctacgtgacggtgaggggagagaaggctatgcaacttctcgagagcggtttgaaggttaaggagtatgaacttttgaggagaaacttcagtgatactggatgcttcggatttggcatccaggagcacattgatcttggcatcaagtacgacccttcaactggtatctacggtatggacttttacgttgtcctggaacgagctgggtaccgcgttggtcgtcgtcgcaggtgcaagtcacgtgttggtattcagcacagagtaacaaaggaggatgccatgaaatggttccaggtcaaatatgaaggtgtcatccttaacaagtctcaaaacattggagcttaggggtagcatttcaagttcagttgagttgtttgaagttttggttatttgattttgactatttactgt

SEQ ID NO: 15613 - DNA, 603 bp, Gossypium hirsutum
  Clone ID: LIB3829-028-Q6-K6-D2
aaaattctctcttgcaagctagccacagattcttccggccagtcaaaagttacgggtttgtacaatttgacaatgaagaatctgcccaaaaagcattgagaagttgaatggtatgctattgaatgataagcaagtctatgtgggcccttttgttcgcaagcaagaaagagatacttctactagcaagacaaaatttaacaatgtctatgtaaagaatctctcggaatcaactaccgatgaagacttgaataaaacttttggtgaatttggtctgatcactagtgctgtggtaatgagggatgtagatgggaaatccaagggctttgggtttatcaacttcgagaatgcagatgatgctgctagagccgttgagtccctcaatggaaagaaatttgatggtaaggagtggtttgtcgggaaagctcaaaaaaaatctgaaagggaggctgaactgaaacatcgatttgagcagacaatgaaagaggcagcggataaatttcaaggagcgaacttgtatgtcaagaatttggatgatagcataagtgacgaaaagcttaaagagctattctctcaatatggtaccataacatcatgcaaggttat

SEQ ID NO: 15614 - DNA, 594 bp, Gossypium hirsutum
  unsure (1)..(594): unsure at all n locations; Clone ID: LIB3829-028-Q6-K6-D4
canatttgagtgccccagtgtgattcctccaacacaaagttctgctattacaacaactacaacctcactcagcctcgtcacttttgcaagacttgccgtcggtattggaccaaaggaggagctctcagaaacgttcctattggtggtgggtgtaggaaaaacaaaagcctactggtgtttcaacatctctggggaaatcaacttcttccaagatgaaaacagtagtttctgaaattggaagatctgggttcgatcatgagcttcagtctactccaattctttggacttcagcggcccagacttcccatcttctatccaatctaacctcaatgagagctaccctaaaccctaaccctaacacattgtctaaccctgttagtattaaggaagaagtgagtttgcttggatctcaagtgatgaatgaaccagtggttgcagctgctgcactaaatgctcgaaccctaggcttggatctcgttaaccctttctggaaaaataatcaacaccacgctcaacaacaacagaataataatgggttccttgtaggtgaagttcaaaacacaggtattcaagaactgtatcaaaggctcaaat

SEQ ID NO: 15615 - DNA, 602 bp, Gossypium hirsutum
  Clone ID: LIB3829-028-Q6-K6-D5
ggccttgaaaagaagatgccaccatggcggtgagcaattcaatgatgcttgatgcacatggtgattcaaagaaacaccaaccattggaatggttaatgcaccaaatgtgacttcaagttctgtaaagcaagatccccatgggagggacaggatggtatctctcaataatgaatccagggaaatggatatccctgatgtcgagtcaattgttgatccgcacagtattgttcgtgctacaagattccacaacccttactatcaaaaattaggagagcaagaagatgatgcaaaaagaatcaataaacggggaaagttttgcagaaaaatagcctcccaagacaaggtaagggaatcaacctgcattaaagaaagatgatgtcaaaatgaaatgctcaggtttatgtcatttgcttttagctatccagcttgatcccttttgcaggctatagatgtaaaacaacatgccactgctgttaatcttcctattattatggaatctaacggtaagaggaaaacagctgaacatagctacagacatatgagactgcagatgcatttgaatgagttatctgactgtgataaaaaaactttcttcatgtgca

SEQ ID NO: 15616 - DNA, 580 bp, Gossypium hirsutum
  unsure (1)..(580): unsure at all n locations; Clone ID: LIB3829-028-Q6-K6-D6
ggnaacatcatgatgcagcttccttatctagttgatttcttcggtgacgacaagtgaaaattgcagccgcagttgctaatacgccaaagacaggaagtgtaataccaagaaccacctttacgcaaaggcttcttgggaagcattttggaatggaccagcaattggaaccgaacccgtcaactcgttgtagggaaaaatcaaatgaataaagactgatcatttggagcaacgtggtcgggatttcaccagagagattgttgtgtgaaagattaatattctccagtgaaatcagtcttcccaactctggagggattttccctgaaattgaattgctgctgaggtctaatgaatactgaagaacatccaagctccctaactcacctggaaggtcaccagataacttgttgtggttcaagttcaagctcaacaacttgttgcagttcccaagctcttttggtgttgttccagtcaagctgtttttggacaaatctaaaaattgaagctccaatagaccaccgatggtacgaggtatcggtcctgacagatgattgttgctcaaattgagttcaaacaacttctt

SEQ ID NO: 15617 - DNA, 549 bp, Gossypium hirsutum
  unsure (1)..(549): unsure at all n locations; Clone ID: LIB3829-028-Q6-K6-D7
ttttctttgtattcaatttgcattcgtaatcccatttacagtatataatcggccttttttagccgaccaagagaaaaggaaagggaaaaaataataaaaatgtaaatacaaattttctttttctattattgctttgctgtgttattttgttcttctcgcaggttctatggatgcaggaggtgctgtacggaggaagaggccctggtgacgtggaggtcgtgcgtgggaaaccactcgtgggagcccgatcccctggctggctgcgacgctagcatgttccaaaaacctttggggtttctggtactttcaaactgttgggccccttttggccatttgggattgttttagcagtgggctgttgtaaactgggttaaggattaagttggagggctttgggtgtaatgggattttgagttagggtctaggccaataattttaggctttattttggggtttcaattgggtctcgattaatattttgtattttcggactgtgaacattttattgtttttgggttttttttnaaaaaaaaaaannaaaannaanna

SEQ ID NO: 15618 - DNA, 606 bp, Gossypium hirsutum
  Clone ID: LIB3829-028-Q6-K6-D8
gaacttccactattcctcgccccaaatgaagatttgcatgcttggagatgctcaacacgttgaagaggcagagaagaaggtttggattatatggatgtggaagcattgaagaaactaaacaagaataagaagttagttaagaagcttgccaagaagtatcatgcctttctggcttctgaatctgtcatcaagcaaatccctcgtcttttgggtcctggtctcaacaaagcaggtaaattcccaacccttgtcactcaccaggaatccctagagtcgaaggtgaatgaaacaaaggcaatggttaagttccagctgaaaaaggttctatgcatgggagttgctgttgggaatgttgcaatggaggagaagcagatcttccaaaatgtgcaaatgagcgtcaatttccttgtttctttgttgaagaaaaattggcaaaatgtgaggtgcctctacttgaagagcaccatgggtccttcaaacaggatcttttgagtttatgttttaccttctgttatgtacggactgaaagtagtagtggggatttaatactaaaagcggtttttttcttctcttttacttagaatattcaagtttatgttatgttct

SEQ ID NO: 15619 - DNA, 577 bp, Gossypium hirsutum
  unsure (1)..(577): unsure at all n locations; Clone ID: LIB3829-028-Q6-K6-D9
gttctgtcacactcccacagaaaagggtggaattctttccagcctcttcgcttatacgaaggcttttggaccttccctcatnnttcctcgaaagcatcatattagctcaacaccgcttcaagcctaaaccaggcgatatcttcctctgtagcgctccgaaaagtggaactacatggctcaaagcactgagtttcgccatcgtcactcgaaacctttacgacacctccaatagtccattacttaccaagggtcctcatcattgtgtcccaaatatggtcgggtttgaatataaaccagacgtccgtcaaccaggtatcccactcatacccacccatgcaccttaccattgtttgcccaaatctgttttgggttccgatgatgttaaagttgtttacatttgtcgggacccgaaagatgcgttcgtttccatgtttcactttgcagccaaccgaaggcctaaggaaaacgaacacattgcgatagaggaggcttttgagcttttctgtctagggaggtctgtttttggaccggcttgggatcatattctgggttattggaaagctagtcaagaacgacc

SEQ ID NO: 15620 - DNA, 585 bp, Gossypium hirsutum
  unsure (1)..(585): unsure at all n locations; Clone ID: LIB3829-028-Q6-K6-E1
gcaacatgcagttacattttctgctggtttatcatgtggagggttgaagccattttgtataattccttctgccttcctgcagagagcttatgatcaggttctctttctctttccatccctctgtgtgcaccaggcacctgtatgcatgagtctgaaaattcggtgttcctaagtgtcatgccataaggccttgttctactgcatagaagtagaaatggataaactattccacaatggatgaaatctttttatacttcaggttgtccatgatgtagatcggcagaggattcctgtgcgatttgtcattacgagtgcaggattggtaggatctgatggtccgttgcagtgtggggcatttgatataactttcatgtcatgtttgccaaacatgattgtcatggcagcatcggatgaggatgagctgatagacatggttgccactgctaccaggattgatgatcggccagtctgctttcggtacccaaggggtgccctagtgaggacagactatcctatacatggtnggaagtgctcttgagattggaacaggaaaagttcttgttgagggtaaagatgttgctttac

SEQ ID NO: 15621 - DNA, 600 bp, Gossypium hirsutum
  unsure (1)..(600): unsure at all n locations; Clone ID: LIB3829-028-Q6-K6-E10
cggccgcgtgggnaagnaaataaaggtagnaaaaagcaatggccactcttacagtgcccacgacagttccttcagtgtctgaagattgtgaacaactaagaaaagccttttcaggatggggaactaatgagggcttaatcatagatatattgggtcacagaaatgcggagcaacgaaacttgattcgaaaaacctacgctgaaacctatggagaggatctcctcaaggcactagacaaggaactctcgaatgactttgagaggctggttctgctttgggctcttgatcctgctgaacgtgatgcccttttggctaattaagccaccaaaaggtggacttcaagcaatcaagtccttatggaaatagcctgcacaaggtctgccaaccaactgcttcacgcaaggcaggcttatcatgctcgttataagaagtcgcttgaagaggacgttgctcatcacacgactggggacttccataagctcctcctacctctagtgagttcatacagatatgagggagaggaggtgaacatgactctggcaaaaacagaggcgaagttgcttcatgagaaaatttcaaacaaagcttacagtgatgaca

SEQ ID NO: 15622 - DNA, 585 bp, Gossypium hirsutum
  unsure (1)..(585): unsure at all n locations; Clone ID: LIB3829-028-Q6-K6-E11
anaaaatgnaataaaataataaaaggagggattttttaaaaatttttaaattaagaaaaattctagaaaaaaaaaatccttccttttttcctttgatttccccttatgagatcgtaaaatattcgagaatcccttttttttttcctgtaaaatttatatatctaattatcgctttgtctttgattttatttggggttgttttgagttaattaatatggggagtgaagttttacgacctcaggattgtttgatcgaacggattcggttacctccgacggcgtgtcctcgccggagatacggaaacggtagctttaatcctagttattatcataactacaacaataacaatggaaatggtagatctaacaggaaacccgttcagaggaagcggatcggatcggagcaggggatttcgaagaaatacagctccgccgatgacttgaagacggtgaggaacaatgttatggtggagaaggttacgattatgagacgaggtgagtcgttggattcgaagatcaagatcgacaatggcggtggtggaagggaagggggttttggttgttatgggtacggatcgtttgggtc

SEQ ID NO: 15623 - DNA, 598 bp, Gossypium hirsutum
  Clone ID: LIB3829-028-Q6-K6-E12
gcgttcggctttgtttgcgagctagccgacgcaccgtcccttcctcctccgcagtttgcttctaaaggtaaaaatcttgtggctgacgtggataaagggaagttgctgccatgggtgttcaagattatgcagagtcaaagttgaagccatctgttgatttaactggatctgcaaaagaatgtagtaacgggccatccattggtgttatagacattggtgtcagtcaaagtgccttccttttccgagttgcattgccgggcatcaggagcgatcaaagtaagttaaaatgtgagatccaacgtgatggaaaggttctgatacagggtatagtaacacaaggcagtgaagtgctgcagggattatcgagtgtgtgccagatgacagttgagaagttatgctctcctgggccattcaccatttcatttaatctgcctggaccagttgatccgcgattgttttctcccaagttccgtcctgatggcattctggaagtggtggtcatgagatacaggaggccaagtgatccagtggatgcctgggctccaccttcttgagatccttgcatcaaattatcaagttcaggaaaaggcatcatgtt

SEQ ID NO: 15624 - DNA, 600 bp, Gossypium hirsutum
  unsure (1)..(600): unsure at all n locations; Clone ID: LIB3829-028-Q6-K6-E2
gtttccccaaactcccttcaaatcctcgtctcaacaatttttgtttaaagcctagtaaaatggcgtccacatttagcggtgatgaaactgctcctttcttcggcttcctcggagccgctgctgccctcgttttctcctgtatgggtgctgcgtacgggacggcgaagagcggtgtcggggtggcgtcgatgggagtgatgaggccggagttggtgatgaaatcgatcgtgcccgttgttatggccggagttttaggtatttatgggttgattattgcggttattatcagcactgggattaacccaaaggccaaatcttactaccttttcgatggctatgctcatctttcctctggtctcgcttgtggcctcgccggtctctctgccggtatggctattggaatcgttggcgatgctggagttagagccaatgcccaacaaccaaagctttttgttggaatgattcttattctcatttttgctgaggctttggctctctatggactcattgtcggtatcatcctctcttcccgggctggtcaatcccgggcagaatagagtgcaaagttccgagacttgngtcattgctagtaggcttcac

SEQ ID NO: 15625 - DNA, 585 bp, Gossypium hirsutum
  unsure (1)..(585): unsure at all n locations; Clone ID: LIB3829-028-Q6-K6-E4
gccgttacaacatccanaaggaactaccctccaccttgtcctccgtcttcgtgggggtatgcagatcttcgtcaaaaccttaaccggcaagaccatcaccctcgaagtcgagagctccgacaccatcgataatgtgaagtctaaaattcaagacaaggaaggcatcccaccagaccagcagcgtcttatcttcgccggaaaacagctcgaggacggccgtaccttggccgattacaacatccagaaggaatccaccctccaccttgtcttacgtcttcgtgggggtatgcagatcttcgtcaaaactttaaccggcaagaccatcaccctcgaagtcgagagctctgacaccatcgataatgtaaagtctaaaattcaagacaaggaaggcatcccaccagaccagcagcgtctcatcttcgccggcaaacagctcgaagatggccgtaccctggccgattataatatccagaaggaatccaccctccacctcgtcctccgtcttcgcgggggaatgcagatcttcgtgaaaaccttgaccggcaagaccatcaccttggaggtggagagttcggacaccatcga

SEQ ID NO: 15626 - DNA, 600 bp, Gossypium hirsutum
  unsure (1)..(600): unsure at all n locations; Clone ID: LIB3829-028-Q6-K6-E5
gntcgacaacgtgaagccaaaatccaatataaggaaggcatccctccagaccagcagcgtctgatcttcgccggaaacagctcgaaccggccggaccttggccgattacaacatccaaaaggagtcaactctccacctcgtcctccgtctgcgcggtgggatgcaaatcttcgtgaaaaccttgactggcaagacaatcactctcgaggtcgagagctccgacacgatcgacaacgttaaagcgaagatccaagacaaggaaggcatcccccagaccagcaacgtctcatctttgccggaaaacaactcgaagacggccgtaccttggccgactacaacatccagaaggagtcaactctccaccttgtccttcgtttgcgcggcgggatgcaaatcttcgttaagacgcttaccggaaagacgatcactctcgaggtcgagagctctgacacgatcgacaacgtgaaagccaaaatccaagacaaggaaggcatcccgccagaccagcaacgtctcatcttcgccggaaagcaactcgaggacgggcggactttagccgattacaatatccagaaggaatcgactcttcatctggttcta

SEQ ID NO: 15627 - DNA, 584 bp, Gossypium hirsutum
  Clone ID: LIB3829-028-Q6-K6-E6
gtttttctgcagcgggtacgaagcaagtaatggggaaaatgaacgaaacctccgagttccgttccccgcgagtaacggacggtcatgggactcacactgcttccattgctgctgggaggtacgtatttccggcttctacattaggttatgctaaaggagtggctgccgggatggcgcctaaagcgagacttgctgcttacaaagtttgctggactgccggttgttttgattctgatattctcgccgcatttgacgccgccgtagctgatggggttgatgtgatttcgttgagtgttggtggtgtcgtggtaccctatcaccttgacgccattgctatcggtgctttcagtgctgctgatcagggggtatttgtgtctgcctcagctggaaacggtggtcctggtggattgaccgtcactaacgtggctccttgggtggctacgatcggtgcagggacgattgatagggattttccagctgatgtcaagcttggaaacgggaaagtcgtgcctggagtcagtgtgtacaatgggctgggtttatctccgggccggatgtacccgttggtatatggcgggaccggc

SEQ ID NO: 15628 - DNA, 590 bp, Gossypium hirsutum
  unsure (1)..(590): unsure at all n locations; Clone ID: LIB3829-028-Q6-K6-E7
cttccttttccgttttagatctcaaaatcaaaagctctctttttcatctcatggctgctactatcgtctccgtcaaagctagnngcagatcttcgacaggccgtgngaaatccaacggttgaggttgatgtggaaacatcgaacggtataaaggctagggccgcagttcctagcggtgcatccactggaatttacgaggctcttgagttgagagatggaggttccgattacctcggtaaaggtgtatcgaaggctgttgctaatgttaacacaatcatcggccctgcattgattggaaaggacccaaccgagcagactgcaattgacaatttcatggttcaacaactggatggaacccaaaatgagtggggttggtgcaaacaaaagctcggtgcaaatgccattcttgccgtgtcccttgctgtttgcaaagctggagctgaagtcaagaaacttcccctttacaagcacattgctaaccttgccggtaacagcaagttggttcttcctgtccctgctttcaatgtcatcaatggtggttcacatgcaggaaacaaacttgctatgcaggagttcatgattcttcctgt

SEQ ID NO: 15629 - DNA, 495 bp, Gossypium hirsutum
  Clone ID: LIB3829-028-Q6-K6-E8
gtgggatgccatcatgcactttttgatccacttagccccatatgcaagctttgctgcacggaaggcccagagacattggcaccaagtacaaattttggtcctgtaagttttgcaccttggaaaacagtgtgaaactggataaatgctcagcatgtgaccaatggagatattcacatggtgctcctatatcaactccagctcccaacgttggcacatgagaagtaatccaagtcggttgatttttccttgttactgcacgtgttacaagagatagggagcattttcaacagttgttttggttgcttattacaatgccttgttttgtcttggcagccctgtttttattcatcttttggatgctattaaaatgttctattgattagagtgatgaggggcggatctgggtagaatcacattttggggcgaactgatgatgttatttcataatcttttcaatgtaaataccagctcctaccatacactcatttgttgtct

SEQ ID NO: 15630 - DNA, 585 bp, Gossypium hirsutum
  unsure (1)..(585): unsure at all n locations; Clone ID: LIB3829-028-Q6-K6-E9
ngggctganaagctgttcatccgctatatgagcagctattagcagctcatgtttcttgtctccgtgtggcaacgccaatcgaccagttgcctttgattgacgcacagttagcacaatctcataaccttcttagatcttatgcttcacagcatcatcaacatggtcattccctatcaccccatgaaagacaggagctcgacaacttcttggcacaatatttgatagttctgtgtactttcaaagaacagcttcaacaacatgtcagagtccatgccattgaagctgtcatggcttgccgtgaaatcgaaaataacttgcaagctcttactggagtcacattgggtgaaggaacaggtgcaacaatgtcagatgatgaggatgatatgcagatggacttctctttggatcaatccggcaccgatgggcacgatttaatgggttttggtcccttgattcctactgaatccgaaagatctttaatggagagggttcgccaggagctcaagattgaattgaaacagggttttaaatctagaatcgaagatgtgagggaggaaattttacggaaaagaaggctgggaaatt

SEQ ID NO: 15631 - DNA, 601 bp, Gossypium hirsutum
  unsure (1)..(601): unsure at all n locations; Clone ID: LIB3829-028-Q6-K6-F1
ctcatatctctcctttgtttccccttttctctctcttttttcaaccctaaccctacctcaccaaccaggattcaacatgaagggaggaaaatctaagtcagatactaagagtgccaagctatccgtgaaatccaanagctggaaagaaatcggggaaggctgccaaggatccaaacaagccaaagaggcctgctagtgccttcttcgttttcatggaggagttccgtgagcaatacaagaaggatcaccctaaaaacaaatccgttgccgctgtcggcaaagctggtggagataaatggaagagcttgtctgaagctgaaaaagcaccttatgtagccaaggcagaaaagcgaaaggtcgagtatgaaaagaacatgaaggcctacaataagagacaggctgagggtcctaaagacgaagatgttgagtctgacaaatcagtgtctgaggtgaatgatgaggatgatgatgaagaaggcagcggagacgaagaagatgatgagtaggaaggtccgtggtggatagcataatcaatgtaggctgtgatagtgtttgatcaaaaccatatgttaatgctttcgatgtttccatgttattcttt

SEQ ID NO: 15632 - DNA, 604 bp, Gossypium hirsutum
  unsure (1)..(604): unsure at all n locations; Clone ID: LIB3829-028-Q6-K6-F10
caagnaaagctgattccagaaacaaagagttgagcgtctcaattgcgtccccagctaccttaactctccctccaaaacccaaatcctcaattcccaaaacttccttcaccggcgttagaatccagcacttatgtccccaacggttgccttctcaggcgacctgcttttggcaaccgtcaccttcgtcctccgtggtcatgatggctaagagagaagaagaaatgaaggaaataagagccaaaaccactgaggaaatcaacgatgaagtggttgaattaaaaggtgagcttttgatgcttcgtctccagaaatcggttcgtaatgagttcaagtctagcgagtttgggcgaatgcgcaaaaggattgctcgcatgcttactgttaaacgggaaagagagctcgaagagggcatcaacaagcgattgtcaagaaagctcgatcggcaatggaagaaaagcattgttgtgaaaccacctccatctttgatcaagttgagagagcaagaggcagcagaagaagctgagaaatcggctgcttgagtgatccagtgtttgatactttcacattttcatggctttgtgaagtgctcttttaagttgttgca

SEQ ID NO: 15633 - DNA, 604 bp, Gossypium hirsutum
  Clone ID: LIB3829-028-Q6-K6-F11
gcgttcgtatatttcacatccaacagcaaataagcttttgttactttgtgacgaatggagggtccttagctttctcttttaaattaaaaaaaaaatcacacataaaaattttaaaaaaattaaactttgaacaaatttcaaagattttggttttcttctgcaatttctcatccaccaattgaatcaggttgtgaagtattgagggtgtttattatttgttgtttttttataattactgatgtctccgccgctgcttggcgtggaggaggaagggattcagagcaatgttactttactcggttcttcaggctcaatggaaagtgtgtgccagaatagtgctgacttgaaggaacggaactacatgggcttgtctgattgttcttcagtggatagctctgttttttcccctccgtccgaggaaagaaaggctagtttgaatctaaaggcgactgagcttaggctcggacttcctggattgcagtcgcctgaaagaaatccagagctttgcttgttaagttcttctcagcttgatgagaagccgtttttccctttgcatccttcaagtgatggtcactgctttgcatcacagaagagtgttgtttca

SEQ ID NO: 15634 - DNA, 509 bp, Gossypium hirsutum
  Clone ID: LIB3829-028-Q6-K6-F12
gcgttctaagtgccatcgcccagttcctcaggtaccatccccaacaaatcatacaacatgacgttcatcatcggggacgctcgcaacggttgcaacggagaaatgatggtggaggctttcgctgccaaacatacagtcaaagttcccttcacatcacgtggaaaagtgaattcaaggctgcaagcttaatgttcaaagctgatacagccaggacaagagtgacattctacagctcttactaccacacgaggagtgatgacttcgggtctctttgtggtcctgttctggatgaagttagggtttaccctattgtttagatgccaagtgaaaattttttttatgaagcactagagcatataagatggtaagtgaagggttttgtaatggttttacgtttgtatatttagcggttcttgtaagctgtctaaaaccagatggaggaatgcgttgccaatgttgactttcagcaatcatggataacaatttgaagatgctatctgtgtttgatc

SEQ ID NO: 15635 - DNA, 592 bp, Gossypium hirsutum
  unsure (1)..(592): unsure at all n locations; Clone ID: LIB3829-028-Q6-K6-F2
cttcccgtcttcagccggnagtaagtcatggttaagcataacaacgttgtgccaaatgggcacttcaaaagcactggcagaacttgtgaaaacctggttcaatcagccagcaagaaggctagaagaaggattgcaaggcaaaagaaggcggtaaggatctttccaagaccaacttctggacctcttcgcccaatcgtccatggccaaactttgaagtacaacatgaagttgagagctggcaagggtttcactcttgaagagcttaaggctgctggtatttcaaagaaacttgcacctaccattggtattgcagtcgatcaccgtcgtaagaacaagtcccttgaaggtcttcaagccaatgttcagaggcttaaaacttacaaggccaaacttgttgtcttcccaagacgagctcgcaagtttaaggctggtgattcaattgctgaggagcttgcaactgcaacccaagtccagggatcatacatgcctatttctcgtgagaagccttccgtggagcttgtgaaggtcacagaggagatgaagtcattcaaggcctataacaagcttcgtgtggaacgtacaaatgaacgac

SEQ ID NO: 15636 - DNA, 594 bp, Gossypium hirsutum
  unsure (1)..(594): unsure at all n locations; Clone ID: LIB3829-028-Q6-K6-F4
ggnattgtctcctcagaagctgctttggtgatccaagtaacattcagagcttacctgatccgtagatcacaggctcttcgtgcccttagggaattggcaattgccaagactaagctgaaagagatcagatcatattttaataacttctcctatcgtcgtcgagtagcccaggatgcagaagaacgccaaaggttctctgagaaaatcattgtgctgctccttactgttgatgccattgagggagctgatctaatggtgcgagctgctaagaagtcaatggtagacgaactggaagcgatgcttgatgtggtggatcctcagccccaagggagatcactttcaatgaggaggacatttgacatgccagatagtgtcatccagaaggaaatcgccgagggggtggcagaggtggttcgaatgtttgaaagtgatgcggacactgtttgatgcactcttgtaaaaatgttgtgtaatatgacaaaatcaccctttatgggtgctttgcgagtcagatgtttggaagatgcagattagtttatgatgtgtggacctgatctctcgttttattttctgtggcacttgtgtaattgtgtt

SEQ ID NO: 15637 - DNA, 609 bp, Gossypium hirsutum
  unsure (1)..(609): unsure at all n locations; Clone ID: LIB3829-028-Q6-K6-F5
cggtcgacccagcgttcgccccgcgtccgaataaacttcttttttagcacccaanaaaaaaaaagtctcttctttcattgatcaacttgtttctcttacagttccttgttttatgcttcatactgttgtttctcttcatctttcgatcagtcccacttctgggtatttctcgttttgaggttttaattggtagccatgaatgctcttgctggaactagccgcaatttccgcctggcctctcgcctacttggcttggactctaagcttgaaaagtctcttctgatcccatttagagagatcaaggtggagtgcacaattcccaaggacgatggaaccttggtgtcctacgttggattcagaatacagcatgataatgctcgtggtcccatgaaaggaggaatcagatatcatcctgaggttgaccctgatgaagtaaatgcacttgctcaactaatgacctggaagactgctgtagcagacattccatatggtggtgcaaaaggtggaataggatgctctcctagggacttaagtaagagtgaattggaacgtctaactcgcgtcttcactcaaaagatccatgatctcattggtatacatacagatgtt

SEQ ID NO: 15638 - DNA, 582 bp, Gossypium hirsutum
  Clone ID: LIB3829-028-Q6-K6-F6
gctctctcatcctgcttctggtcaagccaatctcaaagtctccccttttagctcacagctctctcgagttctgtaatgggtaaggagaaggttcacatcaacattgtggtcatcggccatgtcgactctgggaagtctacaaccactggtcatttgatctacaagcttggtggtattgacaagcgtgtgattgagaggtttgagaaggaggctgctgagatgaacaaaaggtcatttaagtatgcatgggtgcttgacaagcttaaggccgaacgtgaacgtggtattaccatcgatattgccctctggaagtttgaaactaccaaatactactgcactgtcattgatgcccctggacaccgtgacttcatcaagaacatgattactggtacctcacaggctgactgtgctgttctcattatcgactcgaccactggtggtttcgaagctggtatctcaaaggatggtcagacacgtgagcatgctttgcttgcgtttacccttggtgtcaagcagatgatttgctgctgcaacaagatggatgcaacaactccaaaatactccaaggcaaggtatgatgaa

SEQ ID NO: 15639 - DNA, 599 bp, Gossypium hirsutum
  unsure (1)..(599): unsure at all n locations; Clone ID: LIB3829-028-Q6-K6-F7
ctttccaatttgcctctgaccctgntgtaactgttcgaaccaaacacttggtgcaatatcttccttgatccgccacaacaaacccggtattgctgcatttcgacttgcaaatggttatgcagccttgagagatgctgtgggagctgatagtgcaagatttcaaaggaaagccttgaacttgattcaatatctactgcatgaaaattattcagattgcaatgttgtaaaagagctggggctccctcgtgtaatgttgcatcttgcctcgagtgaggatgcagaagtaagagaagctgctcttcgtggtctccttgagcttgcccgggacaagacaggtgggagtaatggtggtttaggtgaagaagatgagaagctgaagcaaattctcgaggatcgaattaaaggtatcagcttgatgtctcctgaagaccttggggctactagggaggaaaggcagcttgtggactgcctgtggagtacatgttataaggagccttcgtcccttcgagagaagggacttttatcacttcccggtgaagatgaccctccacctgatgttgccagcaagcattttgagcctcctctcaaaggttgggctg

SEQ ID NO: 15640 - DNA, 593 bp, Gossypium hirsutum
  Clone ID: LIB3829-028-Q6-K6-F8
gcatttcgaaataccgacttgaaacttgctggggccattagggatgaatgagacatcagatttatttcatgcagatccttttgttgctgattcaaagccttcgatagatagtatcgttaaggatgaaaataatcccatagcaaacgtggagctgaacaggaagggcgattcaaccaacaatgagaatcagaagtctggcaggaaagcttctaatcctgcaaaacaagatcatactgagaatgggcctcaaatcagtcctgcactgccaagctacatggcagcaactgaatctgccaaggctaagctgagactgcaaggctctcctcgatttagccaggatggaggtgaaaaacataacctcgctcgtcgccagtccctgccaatttcagccaatagtaaaatccactcacagtcaccaaggacgcagagactggttcatgcagggaaggaagggagcaaaagcgacagaccactgtcatccagagacagaaatgccaaggcgactcaagtagagtggaggaggtgatcttattgagatttgaggagttgttggcactattaggttcaagattcatatgctttgtggtgtaaat

SEQ ID NO: 15641 - DNA, 581 bp, Gossypium hirsutum
  unsure (1)..(581): unsure at all n locations; Clone ID: LIB3829-028-Q6-K6-F9
caagnagattcagctcagtattaagagggttcctactgttgtttcgaatttcaaaggatgaggcggaagagactgctcgccggagcggtggatgtgggaagaattgccttagaaactgttgcatttcaggagcaaagcttcctttatatgctttcaagaaggagagtgaaaaagagcatttgaaagtgataacaaagagcctccggttgcttttcttgattctctcgttcttggggagtgggaggatcgcatgcaaagagggctctttcgatatgatgttactgcctgtgaaaccaaggtgattcctggtgaatatggctttattgctcagctgaacgagggccgccaccttaagaagaggccaactgagttccgtgtagataaggttctccagcccttcgatgggaacaaattcaactttaccaaagtcggacaagaagaggtgctcttccagtttgaagcaagtgaagatggtgaagttcagttcttcccgaatgctcccattgatgttgagaatcacccaagtgttgttgccataaacgttagtcctattgaatacggacatgtgctgttgatccctc

SEQ ID NO: 15642 - DNA, 601 bp, Gossypium hirsutum
  Clone ID: LIB3829-028-Q6-K6-G1
gccttgtttgggagctatgaagtgaaagaaaaaaataaggagcaacagagagtttttctagttactaacatcatcaacatcatcatcatcatcatcatcatcataggccatgaaccaaggagtgttgcagagctcaccagtgcaacaattaatggccggaaaccctgattggtggagcatcaacaacgccatgcgaccaccatcaactcatcatcatcatcaacaaacagcttcccctttcttccctttccctccaccacagccaccaccaccaccggcggcagcggcggctgctgctactttcttccctcaactcatccctacttccacttcttcttcttcttcatggcatgataataataaccaagaggttcctgaatcatggagtcaattactcttgggaggactggtgggagaagaacaagcaacagcattacaacaccaagcttcaactggtaataataatattatgaaacaagaaaactatgtgtatggccatgcaaatgaagattaccatcatcatcatcatcattatcaaggatctaaagcaacaactaattggtccatggctactgcttcttcatcaccaaaatcctgtgta

SEQ ID NO: 15643 - DNA, 602 bp, Gossypium hirsutum
  unsure (1)..(602): unsure at all n locations; Clone ID: LIB3829-028-Q6-K6-G10
gctttttcaacctggttgggcaaacgatcatttcatctatgaaggagagcttcttaagctcaaacttgataacttttctggtgctgggtttgcatcaaaaagcaggtatttgtttgngaaaagtatccatgcagattaaacttgtagagggtgactctgctgggactgtcactgcttactatatgtcatcggagggtccataccacaatgagttcgacttcgagttcctgggcaataccacaggtgaaccttaccttctccagaccaatgtgtacgtgaatggtgtagggaacagagagcaaagaatgaacctttggtttgaccccaccaaggacttccactcttacactctcctttggaaccagcgccaagttgtatttctagtggatgagacaccaataagagtgcacaccaacatggaacacaaaggaattccttttcccaaagaccaagccatgggtgtatatagctcaatctggaatgctgatgattgggccacacagggtggcctagtcaagactgattggagccatgcaccatttgttgcctcctacaaaggcttcgaaatcgacgcatgcgagtgcccggtttccgtgacagca

SEQ ID NO: 15644 - DNA, 606 bp, Gossypium hirsutum
  Clone ID: LIB3829-028-Q6-K6-G11
gggctctgttgtggagaaactgctttgataatctgtggcgactacatggaagatttcgaagtgatggtgcctttccaagtgctgcaagcctttggtgttcgagttgattgcgtctctcccaccaaattacctggtcaaaaatgcttcactgccatccatgtgtccttgggatttgaggtaaaatgctttgctatttcatcatacatgtatggttagttcccaccagggtccagaaacaaaggtacgctgtttttgtttccagggcattgaatatgagagtttaaaatctttttccagcattactcagaactgccaggccatttatttacactgaattcgaacttcaatgaagtggaggtcggatgctatgatgccctggttattcctggcggccggttctcggagcacttcagcgttgacgagagggtcttgagcattgttaaagcgtttgctgaagcaggaaagcctattgtcaccacttgccatagccaactcattttggcggcggcagggcttttgaaaggcaagaaatgcactgcctttgcaagcatgaaaccagtgattgagctggcgggtggtatttggtgggagcaacctggaatcaca

SEQ ID NO: 15645 - DNA, 592 bp, Gossypium hirsutum
  Clone ID: LIB3829-028-Q6-K6-G12
gcgttcgctcggagctctgtcgagcctccgtcatcgggttcccatgcgctcacgcgccaccgctgacttcgccgagtacggcggtcagaatacgaagcgtttcgccttttctacaggaaaaaaagtaatctcttttatttatttttatagtattttgcatgcatgaaacgttgatatctaagaaaagaaaaaggatcacctttgttttctgacaaagtgaagaaatctgtaatattctcttgtgctctttttatttctttttcgtgtgtctttacagattacaaagaagcgcttttatagccctgtgtaaatcattacaatttgggaaagaaatctttgatttctttccatattttgcttctcttttttgctgcggttcttttcattttgcagatatcaatgagggtctggtagtaaacgggaactgacaacggcacaccggcgttgattcaggcgtcaatcctggcgtgatacggaacatggaatcacgacattgatggtgggtcactgcgagacgacggacgcgtctgttggggtgcttgtggcgcctaaggtttctgaaaccctcagcctttctgtctcctgttaatga

SEQ ID NO: 15646 - DNA, 603 bp, Gossypium hirsutum
  unsure (1)..(603): unsure at all n locations; Clone ID: LIB3829-028-Q6-K6-G2
aaccaaanaggtgaacttggttgagcttggccctggcagaggaactctaatggccgatcttcttcgtggtgcatcaaaatttaaaaattttacggagtcattgcatatacacatggtagaatgtagccctgcattgcaaaaacttcagcaccaaagcttgaaatgcatgngatgatagaaaataccagtgaaggtgttgataaaagtgccgaccataattatagcccatgagttctatgatgcactgccagttcatcaatttcagaggggttctcgtggctggtgtgagaaaatgatagatgtcacggaagattcatcgttccgctttgttctatctccacagcctacacctgcaactctttacctaatgaagcgcttcaagtgggctgtgcccaaagaagttgagaaacttaatcaaattgaggtttgccccaaagcaatggacttaactagtacacttgcgaagagaataggtgttgatagaggtggagcacttattatcgattatggcctgaacggagtagtgtcagatagtctgcaggcaattcggaagcacaagtttgttaacatacttgacaaccctgggagtgctgatcttagtgc

SEQ ID NO: 15647 - DNA, 125 bp, Gossypium hirsutum
  unsure (1)..(125): unsure at all n locations; Clone ID: LIB3829-028-Q6-K6-G4
gtactgtctctaatatgtcaggtacattactttttcttatgggctttaatgtgtgtacaagaaacagnaaattaatatgtactatagtaagtgtttttttactgccatattacctatgttttggt

SEQ ID NO: 15648 - DNA, 600 bp, Gossypium hirsutum
  Clone ID: LIB3829-028-Q6-K6-G5
ggtttttcattctgggcctctatccatcggcgatcaacttctaccatcgcctctgcaaactccggcacatcgttcactcaggaaaatctctgttctttgcttaatcccttcatttgctaactgttgtgctgctccattggccggtctctgcacatgatttaaggtataaaaccggaattccttgctcaaattgtttacatcttcaatatatgttgagatttcagatctatcaatctcatttctacttgcttttttatcacaataagaaagtccccttcaacttcaagacttctggtattcagatctaagcacatcttcaaggccatagcccaggccactacttcagccgtaatattctggtgaaaagtaattttttgaagctattacccttcctcttgaatcctttaacaaaatactagaacataaactctcttcatttttcctataagtagcattgaaattgacttttacacatgcgtttctcggacttttccaccatttcatggctccacatttcttaggtaaaattcttcccaagtcatccaactctctaatgtaattcttaataaaattcacagtaaatagctcatcttgactgcc

SEQ ID NO: 15649 - DNA, 585 bp, Gossypium hirsutum
  Clone ID: LIB3829-028-Q6-K6-G6
gctctttatgacatctgcttccgcaccctcaagctcgccactcctacctttggtgaccttaaccacctcatctctgctaccatgagtggtgttacatgctgtctacggttccctggacagctgaactctgatctccgtaagctggcggttaaccttatccctttccctcgattacacttcttcatggttggctttgcacccttgacatccagaggatcacagcagtataggaacctgactgttcctgaactgactcagcagatgtgggatgccaaaaacatgatgtgtgctgctgacccacgccatgggcgttacctaactgcttctgcaatgttccggggtaagatgagcactaaggaggtcgacgaacaaatgattaatgtccagaataagaattcgtcatactttgttgagtggatccctaacaatgtgaagtctagcgtgtgtgacatcccacctaagggtctgaaaatggcatctactttcatcggaaattcaacttcgattcaggagatgtttaggagggttagtgagcagtttacagctatgttcaggaggaaagctttcttgcactggtacactgga

SEQ ID NO: 15650 - DNA, 602 bp, Gossypium hirsutum
  unsure (1)..(602): unsure at all n locations; Clone ID: LIB3829-028-Q6-K6-G8
cggccgcgtgggnaaaaacagttgattgttgataatttgaaactgagacgaagacttcaatggcgtttccagtagtcgataccgagtatctcaaggagatcgataaagctcgtcgagaccttcgcgctttcatcgccttgaagaactgcgctcctatcatgcttcgcttagcgtggcacgatgccgggacgtatgatgtgagtactaaaaccggaggtccaaatggctctataaggaatgaagaagagttcactcatggcgccaatagcggcttgaaaatcgctattgatttttgtgaggaagtgaaggctaaacatcctaaaattacgtatgctgacctataccagcttgctggtgttgttgctgttgaagtcactggaggtcctaccattgactttgtacctggaagaaaggattcaaacatttgccccagggaaggccgactgccagatgctaaaagaggtgcacctcatctgagggacatcttctatcgaatgggtctttctgacaaagatattgtggcattatctgggggtcacactctgggaagggctcatcctgagagatcaggttttgatggcccttggaccaatgaacccctg

SEQ ID NO: 15651 - DNA, 571 bp, Gossypium hirsutum
  Clone ID: LIB3829-028-Q6-K6-G9
tgtacgttcaatcgaagctctggcaatctagtgatcaactccaccgagtcgagtcgcgagccccattcctgcttcgaacatttgagaccatttctggtgttttagggtttgatcacagtgagaaagaccgatgggaggtggccatggagggagcacaacttacaaaggtgtaaatttgcaccacccaaagagatggcacgtcgccaccggcaagggcttgtgcgctgacatgtggttttgggtcctgtacagggctaaccaggatggtcccgtagtgttgggttggcgacacccttgggagggccatgatgaccattctcatggccatggagacaagcattagcctgaagaagcttatctgcttatgggtgcgtggcacagatgctgttctggaatgtcttctgtttattttcttcggtgtcaataaagtgatggtgaaatgggattgtaagcataatgaaatgaaaactgaaacttcatttatgcattatggttttcctgttaaagcgtggatttttatggacgaatgcatttggtttattgcgcacctctggtttggctgaacgtagat

SEQ ID NO: 15652 - DNA, 504 bp, Gossypium hirsutum
  unsure (1)..(504): unsure at all n locations; Clone ID: LIB3829-028-Q6-K6-H1
gcagaatattaataccaaaaaaactagtgcaattttcttatggcattagtgaaagtcttacatatatatatacatactacctagtagtaatatttattatctaataataatggtctagccaggatgggttgggtcatatatatgttcttcacttacatatagagctagaagaaaaaaaaaacactttcaccaccagaaatgaaggagaatttcctggttctttgtcttactctagctgcaaccaaatcccaaggtaactctctgtgttcactttggacactttcttacattaatgtaaacaaataattaaaaccctttcttctttatgtgatgagcaccacgaactaggaataagagaaatggaaagaaacaaanagagtcatttggaagaaagacaaagaagttattgtatttatgcattaaaagatctctcttttatatatatatatattgaattttatgacacctatactgtatgtacaatgtcaaatatcacaagtgatg

SEQ ID NO: 15653 - DNA, 597 bp, Gossypium hirsutum
  Clone ID: LIB3829-028-Q6-K6-H10
gtcgatgcttattcagctgcatcattgaaggccggacatatgcttatcctggaatgagacctacaagttttactgggagtcagatcatcatgccactcggccagacggccgaacacgaagagctgctcgaagttataagactcgaaggccagtctcttacgcaagaagatgcctttctatcaagggacattcatctattacagatatgtagtggaattgatgacaatgcggttggggcctgttcggagcttgtgtttgcaccaatagatgagatgtttccggatgatgctgccttactaccttcgggattccgcattatcccgttggagtcaaaaccagattcgtcggctacaaatcggactttggatcttacttcgagtctcgaagtggggcctgcaacaagccaagctgccggagattctccgtgtcagaacgcacgatcggtgttgacaattgccttccagtttcccttcgataccaatcttcaggataatgttctgaccatggcacgccagtatgtccgtagcgtcatttcttctgtccagaggattgctatggccatatctccatgtggatcgagcccaactataggaccaa

SEQ ID NO: 15654 - DNA, 586 bp, Gossypium hirsutum
  unsure (1)..(586): unsure at all n locations; Clone ID: LIB3829-028-Q6-K6-H11
ataggaaggaacttgngagatattgatattggaaatacgttgctggtggtattgttgtattcaatcttgatacaaagcaggttaagtggacaaaagatttagatttgagcacagatactgccgacttccatgcacatatatactcttcaccaaatgttgttgatttggatggtgatggaaacttggacatccttgtgggaacttcatttggtttgttctatgtattggatcaccatggaaatgtcagagaaaagtttcctcttgaaatggcagaaattcaaagtgctgtaattgcagctgatatcaatgatgatggcaagatagagctagtgacgacagatacacatgggaatgttgctgcatggactgcacaagggaaagaaatttggcaagttcacgtgaagagtctaattccccaggtgagttgtagcaccctttctgtatgcatttataatttggtattgttctgtcactttcttttcattcctgacaaattccatagcttgttatcactactgattatagttgcagtaagggatatgatatgttcatcgttgcatgccccgggtgcatgttagccatcttt

SEQ ID NO: 15655 - DNA, 589 bp, Gossypium hirsutum
  unsure (1)..(589): unsure at all n locations; Clone ID: LIB3829-028-Q6-K6-H12
gcgttcgcggccgcgtgggttcggaacaaaattcaatgaccgtattcactttgngagaattatcatgtcgaaacttataacaacatttcaaactggcatgtaccaattttggctatgacggcagatgttatccaggccacacatgaggagtgcctacggcgtggaatggatggatatgtatctaaaccatttgaagccgagcaattataccgggaagtttcacgatttttccattaggcatcagatcagaatcggttggaaggacttctgtgcatgacttgctgatggcatcagtacaaccgccccttctatggcatgctttgagataccttaataagtcgcaattcttcccaagagaaaaaacgtgtttttgtagcagggtgtatataaaatcatgcttgggtatgggattttcttgtattctacaaagcagttgacaaaggttgtagatcctttttcatttttgcctgtaaagttggtcacgatcacaagccttccagcagggttggtgaattcagatttctgtgcagtaaaaagaaaaacactgattttaacttagggtaaaaaccaaaattaccatattgaaatg

SEQ ID NO: 15656 - DNA, 578 bp, Gossypium hirsutum
  unsure (1)..(578): unsure at all n locations; Clone ID: LIB3829-028-Q6-K6-H4
gttagtatgttcttattagaaaaaaaacctatcatcagaaaaaaaagtttgacttctatgactaatgtagaagttttactgtgaacaatgacctgcngaaaattgcagggactagtgatgtagtaacattgtgtcaatagaaattctctgtttgatttattttctgatgactaggttttttattttatgtatttgaaagattgtatttatatacatttatttatattaaaatataagttagtatgttcttaattagaataaaaaaaaaaaaaaaaaaaaaaaaaaaaaaaaaaaaaaaaaaaaaaaaaaaaaaaaaaaaaaaaaaaaaaaaaaaaaaaaaaaaaaaaaggggggggccggttttaggggatccaagtttacttccccgggcttgcaacgtattagtttttttttggggccacctaatttaaattcattggccggcgttttacaccggcggacctggaaaaaccctggctttccccactttaatcgctttgcagaacatcccctttttgccagttgggttattaccaaaaaggcccgccccgatcgcctttccaaacagttgcccaccc

SEQ ID NO: 15657 - DNA, 596 bp, Gossypium hirsutum
  unsure (1)..(596): unsure at all n locations; Clone ID: LIB3829-028-Q6-K6-H5
tgnacctcacccaacctttcgttttgtattgcagaaaacacagcttgggtgatggtcaatgtatcataaagatcacatagtgtatcgaacttccactcctctctttcaactgccacaaaacgaaaggttgattggctaactgagaagatgcgtagcaataacttcacagtatcatcaatgcatggagatatgcctcagaaggaaagagatgcgattatggctgagtttcgtgatggtgcaacccgtgttcttatcacaacagatgtttgggccagggggctcgatgttcaacaggtgtccctggtgataaattatgaccttccaaataatcgagagctttacatccacaggattggtcgttcaggtcgctttggacgaaagggtgttgccattaactttgtaaaaagtgatgacatcaagattctgcgagatatagagcagtattatagtacccagatcgacgaaatgccaatgaatgtggcggatctgatataagaatggcatggttgaagaagaatgtcatttgtgttatttgcagcgtcttttaagagataggatttgtagtttgtacaccgagtggaaactgaaggcacata

SEQ ID NO: 15658 - DNA, 544 bp, Gossypium hirsutum
  Clone ID: LIB3829-028-Q6-K6-H6
gtgggggcaacaaattattatttgcttgtattgagctttttgaagaacctgagattatatgataaacaaagtgggaccagttgacctaggaactactatggagcggttgaaccggaaattttttttgtttttatgaattttttgataatttgtttaatcaaactggttgaaccaacaaactggtatcaccggtccgattttgaaaactttggtcaaaaccttactagttcaaacagttgttttaggttctataaactgattcgttgtttgatttgtatctgaaaatctgcctactcttgtaatatctcgttatggttttagtccaatgaacatatagttgataaatcttttgtttttatacgatgtttttatgttgtttaagtacaaacgttgctgacatggatcacgtttttgtttgaagttgtttgagattagagcaacaaacatatcactgcacaaataatttctgctaacatttctggtgatatggttcttgctttggctttctcccacgagcttccttgttatggacttgaagtcggta

SEQ ID NO: 15659 - DNA, 598 bp, Gossypium hirsutum
  unsure (1)..(598): unsure at all n locations; Clone ID: LIB3829-028-Q6-K6-H7
gggtttcaggctctcgaagaaccctcccgggngtcgaagcaggtactgatggtaatgccaaccagtcgtcttctgcgcccagtgcgttgtttgaagacaaacctcactcggctaatgatgcctggcgtaagctccattcagatccattgcttatgattcgccagcgcgaacaagaagcacttgctcgtatcaagaacaaccctgtccaaatggccatgattcgcaaatctgttgtagagaagaagcaaaaggaaaaatcccctgatcataaggaacaccgtaagaagcatcaccgtagtagttccaagcatcggaaacattcatcgtctaaacggcattcatattctgaagatgacacttctaaggaggacaaaaaagataaaaatcaccatcgcaagaggtcagattatgaggggcactatcgcagaacagaatcagattcagaacatgaattaaaggaaacagaaagggaagagaagagtcaccgcaggcagaaatatggatatgatgatcaagatgttgataagaggagccatgacaagtctaagcgtgataaatattcttctcaagcttcacgaagtatagatgcagataaaaa

SEQ ID NO: 15660 - DNA, 597 bp, Gossypium hirsutum
  Clone ID: LIB3829-028-Q6-K6-H8
cgacaaccattcgtttgtttgtttcattcctttttcttttcttcctttaatggctccttctatttcttctattttcatttcccacactttcaattctttcacttccttcactaactgctctaaaaacaacaaaaaccacactactccaccttcacaacataaaaatcatcaacttttttcttcttctccaggaaaagtgtctttcgccgctgcaacaggggagcttttcttgggaattgcgtcaagatttattaaaagcagttccaattatgaagattcaggctctacaatccctgttttcagcagacccagaaagagaatcaataggagtgaggctggaaacaatgataaggacagaattgggttagtgatggaggatgaaattgagccagaggtgatatgggaacaacgagtcaaggatattgaagctgaaaaagaaagaagagtggttactagccctggttttagcttctctgctgctggcctcttgtttccttatcatcttggagtagcccagttcctcattgaaaagggttacataaaggaaaccacacctttggctggttcatctgctggtgccataatatgtgcagtgat

SEQ ID NO: 15661 - DNA, 521 bp, Gossypium hirsutum
  unsure (1)..(521): unsure at all n locations; Clone ID: LIB3829-028-Q6-K6-H9
tgtgggnntgatgttccatgggnagatgttcactgacacctgcaaaagttgaggatcatgaaaagctctgatgccattggactcgctccgagggccatggaaaaatgcagaaccggaactagctaccatcatacatgatcttttcccacacaccgaagattattatttctgaaagagatgacatgatgctggagtgggtaggagatcatcatgtaagcctgtttttgttctactgaaaaaagtcgtatccagtgcgtaaggctaccgctataagcaagaactagaaattcccattgtaggcacaaccattgtcggtgtttgtagcgaataaacctgttagtctacattaagttataaaaccttcctagtcctagcgtttgtgagtaactttaagattctatcagtcatgagtccgaacgagtccctgtttcaaagcatgatctttttagtttgtaaagtgcattgcttgttgaacttttatggtgcgtgtttgaatgatgaaagacctcgacatattatct

SEQ ID NO: 15662 - DNA, 581 bp, Gossypium hirsutum
  unsure (1)..(581): unsure at all n locations; Clone ID: LIB3829-029-Q6-K6-A10
tccaaaccccaaaactccagcaaaaggtattattccttaaggttccatcacactagtgttaattggtgatccaaaggaagcttaagtctcttaggttcatcatttgtttgctcctgttcttcttgggtcgtcctggctaaattccactcttcctccatttgtgtggtccatttatgggttgcaaagcatgtgtgtatgctttcaggtccaagtctactgcaagtatgttaaggaaccaagcccatgagtttgtacattcaccttccaccacaacccatgctactggatacatttggttgttagcatctctgccaacagccggtaacatttcacccttgtatggtcccttcaaaaagtagcaatctaaaccaaggttcttggacctcaactcatttgcatagtcccacagaagagcaaattccttcttcacattccttacaagctttttaataaccttatttttagcccttctacaccttgtcaagttaacagttacccacaactctgaagtaaccctctgtgttgtgaagtggncatccatgcaatggtagacatagatcacaaagatgcgagctcaccca

SEQ ID NO: 15663 - DNA, 583 bp, Gossypium hirsutum
  Clone ID: LIB3829-029-Q6-K6-A11
aaaacctggaaaaataatattaaaaggccgccaaatccttttgttttgtttttgtttttttttcttttttcatctcttcgtttgtttctcgagaaattacactcccggattccgtgaagttaatcgagttgccggcgttgctttgaggaaggtatcgaagcatgacgtcagggacgagaatgccgacgtggaaggagagggagaacaacaagcggagagaaaggaggaggagggcgatcgcggcgaagatcttcgcgggtttgcgaatgtacggaaactacaagctaccgaagcactgcgacaacaacgaggtcttgaaagcactctgtaacgaagccggttggaccgtcgaagaagacggcaccacttacagaaagggatgtaaaccagtggatcgtatggacataatgggaggttctgcatcagctagtccatgctcatcatatcacccaagccctggttcatcttccttcccaagtccagcctcatcccattacacggccaatgccaatggcaatgctgatgccaattccctaatcccttggctcaaaaacctttcttctggttcatcttcagcttcatc

SEQ ID NO: 15664 - DNA, 531 bp, Gossypium hirsutum
  Clone ID: LIB3829-029-Q6-K6-A12
gaaaaaaaaaaaaaaaaaaaaaaaaaaaaaagaaaaaaaaaaaaaaagaaaaaaaaaaataataaaaggaaaaaaaaaaaaaaaaaaaaagaaagaagggggaaaaattttaagggggcatgttttaatacacctatgttggcggccgctttttgttcggggaggagttgctttatatttctggggcgggcgaagggttatttagccgtgccgtgcatttcaaaatttcgcgaggtggaaaaactttgtggttgcccgattcattcgcctttcacagagtggggtttttttgaatgggggttaaagacaagacttttcccaccgatttcttttccgaaaagggggacggctcctcgcactgagagggctaatctttgcagggggttttgggagcgctcctttggggtggttacctcgctttgtggcggctttattgggcttactcttagaagctttcatttttttttcccccatatggttgccattcactgcagaggtgtttctcgggggggtcttacttgggtgggtttt

SEQ ID NO: 15665 - DNA, 541 bp, Gossypium hirsutum
  unsure (1)..(541): unsure at all n locations; Clone ID: LIB3829-029-Q6-K6-A7
gnaaggnaaacctttctattcacatctgaacagtgaatgagggtncaccccgacaagctctgcgaccagatctctgatgctgtgctggatgcttgccttgcccaggaccccgacagcaaggttgcctgtgaaacatgcaccaagaccaacatggtcatggtctttggagagattaccaccaaagccaatgtagactatgagaagattgttcgtgacacatgccgctctatcggatttgtttctgatgatgtgggtcttgatgctgacaactgcaaggtcctggtcaatattgagcaacagagccctgatattgcccagggtgtccatggccacttcaccaagcgcccagaagaaattggagctggtgaccagggccatatgtttgggtatgccactgatgagaccccagaactcatgccccttagccatgtncttgcaactaagcttggggctcgtctaactgaggttaggaagaatggaacctggccctggctaaggcctgatggtaaaacccaggttactgttgagtactacaatgaca

SEQ ID NO: 15666 - DNA, 590 bp, Gossypium hirsutum
  unsure (1)..(590): unsure at all n locations; Clone ID: LIB3829-029-Q6-K6-A8
gnaacatttacccaacttcaanaacttcaagnatgaaaacaacccagattttgtggttgaagtggtgtctcttttctttgaagattctgaaagacttctcaatgaactggctagagctctagagcagcagaacatagattacaaaaggattgatgctcatgttcaccagttgaaaggtagtagctccagcattggcgctcagagagttcagaaagtctgcatagccttccgcaactactgcgaggagcagaacgtcgaagggtgtcttaaatgtctgcaacaagtgaggcatgagtattcgcttgtgaaaaccaagcttgaatctttgttccagcttgaacagcagatcttgactgctggaggctcatttccgatgtaatagtttggcttcaaaaagagacctaaaaatcatttgcagagaaaaaacaagggaccaaaaatgatattttggcaatgtagaaaaagttattatcttttatctttgttggttttcaattattgcagttttagtagggtaactaagctactgaaggggatctatctactttcgagcttaagcttgtatcatatcttcagtgtatgagcaatga

SEQ ID NO: 15667 - DNA, 564 bp, Gossypium hirsutum
  Clone ID: LIB3829-029-Q6-K6-B12
ggaagcggtatcacgatcaaaaactgaccacgcagctgaggacgatgacaaggcttgtacccgcaacagaaggcgtaatgctagaagtcaatctatgggcccttcaaccacaagcagaagaagtggagataaagaagaaggctgaaaataaaaggcgttgtttgagacggcgaactgctaggtttaaatcccaagaggcagagaatctatttgagattgatgacctcgactatgtgggcgctcaacctgatactccgatgcatgaattagcagcttcatctcttagcatggaagaagcttgtagtaacccaagagctgaaagcagaagttcgatcgctgcaaggccattaccattacgcaaagcagtcgagaaagtgcagtcatacaaggaagttccacttaatatcaaaatgcggagaaatgagtgaacatcaacaaccaaccgcttcattcttctaatttaatacttgtaacctatgtagtgttatttgtggaacttaattctgtcgtaatctatctatccctacatgctgttgtttattccaaacatctagttgactgcag

SEQ ID NO: 15668 - DNA, 572 bp, Gossypium hirsutum
  Clone ID: LIB3829-029-Q6-K6-B7
cccaaatcctgaacgcttttgctctcactccactccttcctggccgattctctccaaaaccctaaacctgacatttccgcctattaccagacccgcgccgcccaccacgccgtcgtaacgagcgattggctgtcccaggcccaggctgccgttagcctccagaccaacgacgatgtctcgtcgggaagtgacggaagagtcgctccgactggtggaggaactggtggggataataagacttttagcgtcattgatgagttcaatagctggaggaaacagccggatttggcggaggctgtggcggctattcgcgctctcgctgctgttattagggctagccaagctactaccatgatggaacttgaaattgagcttaaaaaggcttctgattcgcttaaagcatgggacgcgacctcaatctctttgacagcaggttgcgatctcttcatgcgatatgtgactcgaacatcagctttagagtatgaggactttaattcagctaggtatcggttgattgaacgtgcagagaagtttggggaaatatcttacaaggcacgtcggattattgcaat

SEQ ID NO: 15669 - DNA, 588 bp, Gossypium hirsutum
  unsure (1)..(588): unsure at all n locations; Clone ID: LIB3829-029-Q6-K6-B8
ctgnaaccgnaaacatacagtggaggtgaaattcttggaacagaaacanagaagcagcagatagcagactcagatgaaagttttacgaaggatcaaactccaactgccctgattctgaacttttcagacatcgattcagttccctcggtagaagaccttaataaaacctttagccattacgggccattggtttcaccaggtgctgaagtgttcaaaaagagcacccgagccaaagtggttttcaaaagacgagcagatgcagaaatggccttcagcagttccggaaagtacagcattttcggtccctcacttgttagttaccgcctgaaacgactagctgttgcaccaactaaagcttctaccggttcaacgaagcgaatcagggtgggtgaaacacgtgaagatgaaaatactacttgatgatggcttatagtatggtgaaagttgatgtagaaaagaaaggttaagccattcatagctcaaggtatgaacttctaaaatgcctttctttatgaaaattatattattatatacaattatcttggtaggttgtattagttgaaaatgttggtagtatcaaaacacttg

SEQ ID NO: 15670 - DNA, 566 bp, Gossypium hirsutum
  unsure (1)..(566): unsure at all n locations; Clone ID: LIB3829-029-Q6-K6-B9
ccccgcgtccgcttccttgtgtcaagnaactatcaacagattcatcccagcatgttcgatctgctttggcctcagttataatgggaatggcacctgttttagggaaggatgcgaccatagagcaattgcttccaatatttctttctcttctgaaagatgaatttccagatgtccgactgaacatcattagcaagcttgatcaagtcaaccaggtgattggaattgatctgctgtcccagtccctattaccagcaattgtggagcttgcagaggatagacactggagggttcggcttgcgataatagaatacatccctttattggcaagtcagttgggtgttggctttttcgatgacaaacttggtgcactctgcatgcaatggttgaaagataaggtttattccattcgtgatgctgctgctaataacgtgaagcgcctggctgaagaatttggaccagattgggcaatgcagcatatagttccacaggttttagacatgattaacaatcctcattatctgtatcggatgaccattctacatgcaatttctctacttgcccccgtt

SEQ ID NO: 15671 - DNA, 584 bp, Gossypium hirsutum
  unsure (1)..(584): unsure at all n locations; Clone ID: LIB3829-029-Q6-K6-C10
gcaaagttggaccacagnagtgcctagaaattagagcctgtaaaccttctggcagctagaaatgagagggaaagcgttcaattagctatccgtccaaaagtctcttggagtggttctagtgtggctggagttgtgcaggttcaatgctgtgatttatgctcggcatctggtgatcggttgattgttggccaatcattaaaattgcgacgtgttgttcccatattgggtgtacctgatgctcttgtacctcttgacctccctattagccaaataagcctacaacctggggagacaactgctgtctgggtttcaatagatgtgccaaatgaacagcctcctggtttatatgaaggggagatcatcattaatgctacaaaggcagatacagaatcatcatcacaatgcttggggaaggctgagaagcatcaactattcacagaacttcgtaactgtcttgatgctttggagcctatagatggaaagccattggatgaagtggtggaaagagtgaaatcttcaactacatctttaagaaaagttcttctttcttcatccattttctgagttctttttcggataatggg

SEQ ID NO: 15672 - DNA, 590 bp, Gossypium hirsutum
  unsure (1)..(590): unsure at all n locations; Clone ID: LIB3829-029-Q6-K6-C11
gcactttatcgctcanattctttcctggtcttggctggatgcttactagatctgtatggaatgagctatcaccaaaatggccaaaagcttactgggatgactggttgagattaaaagagaatcacaaaggtcgacaattccttcgtcctgaagtgtgcagaacatataatttcggcgagcatgtatgtatcaccttgtcatttagaagatttcttgtttgaaattgttgtgatgacaacttttatgaatgttgttagctttgacgagaatctttgcttggtagaccatctgcctatgtgtgtgtcttccttggggataggaattaggtagtacatgaatgaggcacacagtccatatgttttctgtgcggaattttatgtgctatgattctatttcattgcttctgaaagaatgtacagtgaacttggacgaatataatgcctctatggcttcagtgtttttagttgaagagtttccttcttcaacttttggaatggcttgttttcatgcttaaacaaaattgagattccccaaattaggtgtgttttcatctctctttaacactgcataggcgcaacttcagtaaattt

SEQ ID NO: 15673 - DNA, 500 bp, Gossypium hirsutum
  unsure (1)..(500): unsure at all n locations; Clone ID: LIB3829-029-Q6-K6-C12
atttgagtgctacgagtgtggtgaggctggtcattttgctcgagaatgtcgtacacgtggtggttccgngagacgtcgcagccgcagccctagatatcgtaggagcccaagctatgggcgcagaagttacagtcctcgtggacgatcccctaggcgtcgcagtccctctcctcgtggtcgtagctacagcaggtctccaccataccgtggtcgtgaggaattgccatatgctaatggaaatggtgcaagggaacgccgacggagcaggagttaagtgctgcaaggatgtaactcttatgtgaagggactgattaagtgtgtttagtttgttgacttcagtgctactgttttaattgggcaacgcccgcagcatcttggatttggttaagttactttctgtttttccttatttctatgatggttttatttgctttatctatgctaagtactttttatgcgtaggggggaaaacttacgatgacctctataattttattgag

SEQ ID NO: 15674 - DNA, 579 bp, Gossypium hirsutum
  unsure (1)..(579): unsure at all n locations; Clone ID: LIB3829-029-Q6-K6-C7
tcgccccctccatttccttttttcatctttttattaaaaccaacaaatgctctctttgcttttccctgttttataagtcatcgaactgttgtttttcttgatctctccttcattcccgtttctggtttttttttcttttttttgagtttttagtaggtagccatgaatgctcttgctgcaaccaaccgcaatttccgactagcgtctcgtttacttgggttagactctaagcttgaaaagagtcttctgatcccttttagagaaatcaaggtggagtgcacgattcccaaggacgatggaaccttggcgacttacgttggatttaggatccaacatgataatgctcgtggcccaatgaaaggtggaatcagatatcatcctgaggtcgagcccgatgaagtaaatgctctggctcaactaatgacatggaagacggctgtagcagccattccttacggcggggcaaaaggtggcattggatgcaatcctagggatttaagtaagagtgaattggaacgtntaactcgcgtcttcactcagagaaccatgatcttaacggtatacatacagatgttcctg

SEQ ID NO: 15675 - DNA, 154 bp, Gossypium hirsutum
  unsure (1)..(154): unsure at all n locations; Clone ID: LIB3829-029-Q6-K6-C8
ggnaaatgtagctcctaaccagnataggttcattgattatgaggttggatccttcattattggtatataaatattatgagtcgggcataacaatgattgtaacttgtgagcaaggttattgtaccgtatcaatattgataaaattattgaagat

SEQ ID NO: 15676 - DNA, 504 bp, Gossypium hirsutum
  Clone ID: LIB3829-029-Q6-K6-C9
ctgattcactcttgacgcaaacaaggatagtctccatttccatcttcaaaagcagcagaaaaaaacttcgccatgcattttcttacagttggaggctgtggtcattgccagagattagagactgcttagaagaggctggatttcaatctgtccatttctggcttcggaagatgccagacactagtgaaaacagaagcacagagggattcggcagcgggcgagatgtgaagtatgaagaggtaaaaactttccaacaagaagatgcttggaatgcatatattgtcgcggtaacgaaccttaaagctgcttccgccgcaagttagtggcaaacggctatggatatcatgaaacagcttgctttcatggttgtaaaactggcattttctctgataattgcacttccaatctttcgtggcagcgcatagtttgatgaattattctgtcgtgttatatgaattagaatcttttagcattccagtgaatgagtaagccattaattttcgc

SEQ ID NO: 15677 - DNA, 574 bp, Gossypium hirsutum
  unsure (1)..(574): unsure at all n locations; Clone ID: LIB3829-029-Q6-K6-D12
cggncgcgtgggctcaactaaacttataacgttcgatcgtttaacgcaaacccatttttaagtgggggaaaggtttaagttcagagtcataagcaacatcaatggctccttcaactctgacggctcttgcggaagagaaaaccttgcaggcaagcttcgttcgtgatgaagatgagcgtcctaaggttgcttacaaccaattcagtaatgatatccctgtcatctctcttgctggtatcgatgatgttgatggcaagaggggtgagatatgcaagaagattgttgaggcttgtgaggattggggtgtcttccaggttgtggatcatggtgttgatactaaactcgtgtccgaaatgacccgttttgccagagagttttttgctttgcctgctgaagagaagcttcggttcgatatgtctggtggcaagaaaggtggtttcatcgtctccagccaccttcagggagaagcagtgcaagattggcgggagattgtgacatacttttcatacccattgaagagcagggactattcaaggtggcctgataagccagagggttggattgaagttacaaa

SEQ ID NO: 15678 - DNA, 585 bp, Gossypium hirsutum
  unsure (1)..(585): unsure at all n locations; Clone ID: LIB3829-029-Q6-K6-D7
gnaaagcacaccctttcccttgggctagcatttccagttcaagaactagccacccatcaggttccattaatcctttagagagagctactgcattacaggaggaaccaaacgaaagaaaatcccgagaaacaatgcagagcatccaatgtttgtaccagcaacgcaagatccaacagggtggagtttggcatctngaaaatatcagcacgtctggaggtgttccatcttctaatcgacctgggcctaggtcaaccatccagttgctgtctcctgcctggattcctccttgcaacccaccagtacattaccaacaaagagtatcagaagttgcaccttggtctttatttcctccatttgattctgaacctggtggcagtagtggtcgtttcccgtcattatcttcagccccttctgcttcttcatgggaaacagcagtgtcatctcgatctaacagtcaaggtaataatcaaacataccgaaggtcagctttcatagcagagagacaaggtgatgatgctcttgggaggccccactcattgcgatctttggctgctgatatcgaagggagacaccggctaatttctg

SEQ ID NO: 15679 - DNA, 593 bp, Gossypium hirsutum
  Clone ID: LIB3829-029-Q6-K6-D8
attcctcttccgaacacaaccactcgtttagcccccccttttcaaaacaaaacaaaacccttaacccttttcattagggtttggttcagcatgcagccgccagaccaccatcagtccgatggccgacggcgcgaaccacagactctgtcgacggaggtcgtaaccatggagatctggtaagtcacttctttccctttctttttttttttttttaaaaaatcttcaaatcgtatttcactctttcaaaaaaccaggcgaaaattcaaagaaaaacgttcgaccctcgctcgaatctccttattttcgagatacttgggtgttcatcggtgtcgttacaaatatttctttctttttatgctacaatcgcaagaaaatgaggagagaaacaaaagaataaacagacttgaaaatcacttcttgatttgtgatctctacttttttctatttctttgctgtatgtgcatgtgtcaaaaaaaaaggaaaatacatttcttttggctttatagccgaaatctcgaaaaatcaaaataaaaaatacaatttctctttttcgtatttgctgttgtggtttgtctgtttcttcgctggtacgg

SEQ ID NO: 15680 - DNA, 577 bp, Gossypium hirsutum
  unsure (1)..(577): unsure at all n locations; Clone ID: LIB3829-029-Q6-K6-D9
ctgnaaaccttataaaagccagcttgtcttcaacattctctactcatctcctctcactttccttccatttcctttcttctcttttcagttgggtccctctctctttcaaaacccaaacttgggtcctcgttattaaatcttctctccaagcaaatcctttcctcctcaactcctttcatttccccagttttcctctgtttttcttggtcatggctgagttgatggacgatgctgagttttggttgccggcgaagtttttaaccgacgatgatgttcttatgaagaaagggaacctcgagaacgaaatcggtggaaaaatgggtactgagttgttggtatctagtcatggtttccctactgagttcccttacgagtttgactccttttctcccctgagttcacccgttgaatctgttgttgggtctacggagactgaaagtagtgatgaagatgagtttcttgctggattgactcgacggctcgcttactcaacgagtcagaagcttacagttcctgctaccttttccatggacaaaaacgagaaaaacggagctttagcgagttcaccaaggtcgac

SEQ ID NO: 15681 - DNA, 549 bp, Gossypium hirsutum
  unsure (1)..(549): unsure at all n locations; Clone ID: LIB3829-029-Q6-K6-E10
gcgaagaagcagnactttgtngaaaactcttactggtaagaccatcaccctcgaggtggaaagctccgacacaattgataatgtcaaggccaagatccaagacaaggaagggatcccccctgaccaacagaggcttatcttcgccgggaaacagcttgaggatggccgtacccttgctgactacaacatccaaaaggagtccaccctccaccttgtccttcgtctcaggggtggcatgcagatcttcgtaaaaacccttactggcaagacaatcacccttgaggttgaaagctctgacacaattgataatgtcaaggctaagatccaggataaagaagggatccctcctgaccaacagaggcttatctttgccggtaagcaactggaagatggtcgcacccttgctgactacaacattcaaaaagagtctaccctccaccttgtgcttcgtctcaggggtggcatgcaaatatttgtcaaaacccttactggcaagacaatcaccctttgaagtggaaagctccgacacaattgataatatcaaggcca

SEQ ID NO: 15682 - DNA, 588 bp, Gossypium hirsutum
  unsure (1)..(588): unsure at all n locations; Clone ID: LIB3829-029-Q6-K6-E11
tccgcgnagaggccggcactccttgttcgacagagtttcttggatcttcgtgataattttagacgcattgtagatcctccatgtggtcttctaatgctaaagctcctaaagcgagaaagcaaatagtattggacggtccggttagctgcgggaagagtattgcgcttgcaatgcttgtgcattgggctcgtgatgagggttggcttgttctctatgctcctagaggtcgtgaatggacgcatggaggatgcttctataaaaattccgaaacaggtttttgggacacacctatacaggctgaaaatgtcctcaaggattttctgaaatacaatgaatcacgcttgcaacaattgccatgccaaatttttgatcctattcgattgggagaaggtgctggtgttggatttatgaaaggagttgagtccatggccctccctgaaggggcaacattgtatgacctggttcaaatgggaatcaagtacacacatgcagctgttggagttgtagttcggttgaggaaagaatatcactcgttaaagatgtccctgtgcttatagcaattgaccagtataataattggtttacctt

SEQ ID NO: 15683 - DNA, 469 bp, Gossypium hirsutum
  Clone ID: LIB3829-029-Q6-K6-E12
cccagcgtccgttcttctttaatatataaccatcatcgccattggctaactattcgcaggttgccactaggtactgcacaggaaaaataaagcttttgctataataaactggatctacgaaagaagagtgaagaggcggcttgtctttttcaggtattggatgcaatggcgaaatcgctcgactgccggcattaaagctgaaagccacagcaacacaggtatttcacttataccacattatgctataatttatctgctaattgctatgcactttgaaattttgaggattccaagtataatgctttttattactagcctctggtttatggagagctctatcttcattagtaactgaacatacatcctaacaatttgtgggagatgaccataatgaacttacagacatgggttattctcaatcaatgaatgcgtgaagggttatacatgcaacgaaacatgggtcaactca

SEQ ID NO: 15684 - DNA, 571 bp, Gossypium hirsutum
  unsure (1)..(571): unsure at all n locations; Clone ID: LIB3829-029-Q6-K6-E7
caccgntaattcttatgatcagcccacggnaagacatcagagggctttgaatgatcttgtgagatcggctgagcctggggattttctgtttgtgcactacagtggccatgggactaggcttcctgctgagactggggacgatgatgatactggctacgatgagtgcattgtcccctgcgatatgaatctcatcactgatgatgatttcagagagttggtggataaagtcccaaaggtagccgcattacaatcgtatcagattcatgccacagtgggggattgattgatgaggccaaagagcaaattggtgatagctctaagccccaaggttcagaaccagaatcagaatcaggttcaagtgggttcaggagcttcttgcaccacactgtactagatgcatttgaatctcgtggaattcatgttccttctagattacgccaccgcgaccaccaccatgataaggaagaggtggatgacaggggagtgaatgaagactatgatgacagtggctacgtcaaaagcagatctctgcccctctcaactctaattgaaatgctcaagcagaaaactg

SEQ ID NO: 15685 - DNA, 226 bp, Gossypium hirsutum
  unsure (1)..(226): unsure at all n locations; Clone ID: LIB3829-029-Q6-K6-E8
cggccgcgtgggnaaaaaaaaaaaaaaaaaaaaaaaaaaaaaaaaaaaaaaaaaaaaaaaaaaaaaaaaaaaaaaaaaaaaaaaaaaaaaaaaaaaaaagggcgggccgttttaaaagaaaccaagctttacatacgcttccttgccgacgccttaatatcttttataggactcacctaaatttcattgcattggcccggggaatttccaacggttgacattggga

SEQ ID NO: 15686 - DNA, 578 bp, Gossypium hirsutum
  unsure (1)..(578): unsure at all n locations; Clone ID: LIB3829-029-Q6-K6-E9
ctttgnacatatctttcatgaaaaagagaatactggttgagatgttgcagaacactgagataccagaaaaacccatgtttaaacctgaatttcctcctcaagaagcagaaccttctgttgtcattgtggatgaagaagggaaacctactgatagagttgaatcagcccttaagtgtcttcctcattatgatcctgctagctgctggagtggggatacacttccatcgttccggtactggaagattcgtgactttgcttatgcttatcgatcaaaacttgtgacaccttctaagatagcagaacaagtcatcacacttgttgaggggtgtaaatatcataaggccccaacaccattattgatttcatttgatgctgaggatatcaggatgcaagcagcagcttcaacacaaaggtttaaggaaggaaatccattgtcaatcttggatggaattttcatggcaatcaaggatgacatagactgctatcctcatccaactaagggtgcatcaacatggatgcatgaggttagatctgttgagaagnatgcagtttctgtctcaagatgcggagctgtggtg

SEQ ID NO: 15687 - DNA, 585 bp, Gossypium hirsutum
  unsure (1)..(585): unsure at all n locations; Clone ID: LIB3829-029-Q6-K6-F7
cggncgcgtggggggagtgccataggctcaatttttcttgcgccgtcattatccctcccagccaaaggtaagccatggttaaacataacaatgttgtgccaaatggccatttcaagaagcattggcagaactatgtgaaaacttggttcaatcagcctgcaaggaaggctagaagaagaattgcaaggcaaaagaaggccgtgaggatcttcccaaggccaactgctggacctctacgccctattgtccatggacagactttgaagtataacatgaagttgagagctggcaagggtttcacccttgaagagcttaaagctgcgggtatttcaaagaaacttgcacccaccatcggtatctcagttgatcaccgtcgtaagaaccgatctcttgaaggtcttcaagccaatgttcagaggcttaagacttacaaggccaaacttgttgtcttccctagacgtgctcgcaagtctaaggccggtgattctactgctgaggagcttgcaactgcaacccanatgcaaggaccatacatgcctatttcccgtgagaagccttctgttgagctggtgaaggtcaccgagg

SEQ ID NO: 15688 - DNA, 587 bp, Gossypium hirsutum
  unsure (1)..(587): unsure at all n locations; Clone ID: LIB3829-029-Q6-K6-F8
gnaacggccgtgccttttcttctgaaaccctaaggtcgggtcatgtccagttcgccgcaatcaaccttatgtgtgtcaaggagcgggtgcagttgcatgcaagggtgtagccgtggaagccctacttgccaatcccgagttccgccaccgccgggaacatgggatttgctgtatgcggcggcagaggaagttgcaaggatgcgaatgagtgaagaatcatatggtgggctcaacaacagaggcctcctaggttattcggcaaggaagttctcaccgaacgccgatgttactggcttttacctgcctacccagtctcttgctcaccagaaactacagaccgctcaatttcagatgctgaagcaacagcagctaatgaaacaacaaaatgcatcggtttgggcaggacaaaagcagcagctgcattcgcaccaccataaccatgtggtccaaagcagagtgaggagtaataatagtagcaataggcctatgggtttgtcccaatctgcatggccccctctgcagcagcaaacccagacgccaaacgggtcgggtatgagggcagttttcttgggcaatccaactggaaa

SEQ ID NO: 15689 - DNA, 580 bp, Gossypium hirsutum
  unsure (1)..(580): unsure at all n locations; Clone ID: LIB3829-029-Q6-K6-F9
ccggnatcctctcgtctacatcgtctagcaaaggcaaccgaggagccggcagtcgtggcagaccccgcaccggagacggaggaggacaagactgctgagaccaaagctacttcaaaatctggcagagcaaagaaaaccaaagaacccaaaaccaagaaagctgcagctcctcggaaaccacgggctgctcctactcatccaccttacgaagagatgatcaaagatgcgatcgttactttgaaagagaggacaggttcaagtcagtacgccattgctaagttcattgaagagaaacagaagaatcttcctgggaatttcaagaagcttcttcttgtccatttgaagaagcttgtggctgctgggaagttggtcaaagttaaggcttcgtataaacttccatcggctagatcttcgaagacggctactgctgcttctgctcctgcaaaaaagaaaacggctactactaagtcgaagtctaagcctgcctcaaagcctaaggaagggaagagtacaaaagctactcctaaagcgaaggccaagacaaaaactacttcgaaggccaagagtaagccggcggcta

SEQ ID NO: 15690 - DNA, 381 bp, Gossypium hirsutum
  unsure (1)..(381): unsure at all n locations; Clone ID: LIB3829-029-Q6-K6-G10
cggncgcgtgggcggccgcgtgggttttggatgagatgaggaagaatcagggaagagggcttcagaccacaggagaaggattggagtggggagtgctctttgggtttggacctggcctcactgttgagactgttgtgctccatagtgttgctgcttaaagttaaacaaacatgccttttaagtaattggtcgtgctccacttggcttgcagttttatcttcttcttttttccttttttagaatcctatgaatttgtgtgtttattgttaaagactagaagcctttgatggtgtgggcgggaagcttaacgcctattcagttcatgtatcaacttatattaaatttatggcaataataagttactttgcaaactattctacc

SEQ ID NO: 15691 - DNA, 581 bp, Gossypium hirsutum
  unsure (1)..(581): unsure at all n locations; Clone ID: LIB3829-029-Q6-K6-G11
ggcagttgctgcttggnanatagtcttagcaggcaggttccgtttgcttaaccaatggtgtgactttgttgagaaaaacagcggcacaatatttctgaggatacatggcagcaagttttagcttttagtcggtgtgtgcatgaaaccctagaagggtatgatcctgaaggtgcttggcccgttttaatcgatgactttgttgagcatatgtacagaatttcggggtcgaataaagatacaaacggtttctgtagctatggtgattcagggtcccagttgtgtgcatatgatgactctttgcccggtccggggttgaagaggaagttgcgtgaatgtaacaatgataaaatggagtccttggaaccattattctcgagctctccgaacccgaattgcacatcaaattccaagagaaggtttattttgtgccgatctgatgagagggaagataatcttccccagaattcatgcgatgaaagcatggaaattgttaaacaaagtagtccggtgggttcttccaagtctccatgtgcagttgaaggttgcatgtcaaagggtttagcagggctgttatcgtgttg

SEQ ID NO: 15692 - DNA, 582 bp, Gossypium hirsutum
  unsure (1)..(582): unsure at all n locations; Clone ID: LIB3829-029-Q6-K6-G12
tggttngaggactccgtgcaagggtggcaatattacaagagagcctggtccagttaaaggtggatcctctgttattgctttcgtgaaggatcctgatggttatatttttgagctcatccaaagagcttctactcctgagccactctgtcaagtaatgcttcgtgttggggatttagaccgctctgttaagttctatgaaaaggcgttgggaatgaagctagtaaagaaggtggataggcctgaatataagtactccatagctatgatggggtatgcagaagaacatgagactactgttcttgagttgacttacaattacggagtgactgaatataccaagggaaatgcatgcacaggttgctattagcactgatgatgtatacaaaagcggtgaggttgtggaacatgttatacaagagcttgggggaaaggttactcgtaaaccggggccaattcctgggatcaacactaaaattacctctttcctagatcctgatggctggaaaactgttctggttgacaatgaggactttctgaaggaactcaagtaggcactaaaaaaaagtaatgctactatatgaa

SEQ ID NO: 15693 - DNA, 608 bp, Gossypium hirsutum
  Clone ID: LIB3829-029-Q6-K6-G7
cggtccgaattcccggtcgccccgcgtccgcagtttcttcctctttaagccaggtcaaagaatgatggatcttgagtcagtgcatatgtcatatctaactgattcactacatatatgttttctatctgatgaaacaaaaccaatagccagtaccatagagaatattttgcagtgtgccctagacttccggtcttgtcttactggggatatatggaatgtgggacttgctgaaggtgatttacaggataaactttctaagatcaacatatctcaggttcttggcataaaagaaacgttcgacaaaaatcttaaagaactgcatctactctacctcaaatcacctaaacatggagaatctgggctttcgtgtttctggggatatctcaactataatgactattactttaatgaaaatgaaatgagctattatgctttctcaatctgaagtcctttccatgaagatcgaaagtaggtagcgatatgcattcttgtgtgccactaagttcatcgaaacaagctcaaagtagaagtcctaaactgcatcgtggtttggactcaatactcttagcagcagccaacctgcaccatatcatctttgcactcctgca

SEQ ID NO: 15694 - DNA, 582 bp, Gossypium hirsutum
  unsure (1)..(582): unsure at all n locations; Clone ID: LIB3829-029-Q6-K6-G8
gtttttggaggtctatttattgcacctctganattatagctttcatgttcttttccccattgaaaaaaattttcgctagattctttaatccattaagatatcatgggcaaaggtccaggtctcttacactgaaatcggcaagaaagccagagaccttctttacaaggattatcagactgaccacaagttcactctcaccaccagctctccaactggagttgctattacctctgccggaacaaagaaaggcgaactctttttggctgatgttaacacccagctgaagaataagaatgtcacaactgatattaaagtggatacctactccaatctgtataccaccataaccgttgatcaacctgcacccgggctgaaagcaatctttagcttcagagtccctgatcagaggtctggcaaggttgaactccagtatttgcatgaatacgcagggataagctcaagcattggattaactgcaaaccctatagttaacctttcaggtgtgattggaactaatgttcttgcactgggaactgatctctcgtttgacacaaagactgggaatttcacaaaatgcaatgc

SEQ ID NO: 15695 - DNA, 578 bp, Gossypium hirsutum
  unsure (1)..(578): unsure at all n locations; Clone ID: LIB3829-029-Q6-K6-G9
aaccctnnaaaaccacncnngctttgtnntagtgatncnngacatgcannnaaactattttnnngcctccatggnnnccaaacctnattnnnctcagcannacgcaattaccccaccatncanacncttntnngccgagnaagnncttccatcnnncccatttnntcttcactttcgccnnactgccacnnaaatccnncccgccgnnactacgnngcatgctncnnggtgagntnnggtgggnanncaacgacncnntcatcttnnncgacggcnannccgttgnnattccnnngaactgnatnnccccgnagnaatcggnacccggctttnnncgaaacnnccgacnngaggtggnnnttgagaaaaaaacnnacgtacccagcgcgnnnttcgagaaaaacacgcgacnntacatgagaatnngctgatggnnnagaaaaagnngtggaggnnnaggttatannatcacggggnnngtcatgacaannnatctgtgcnntgcgaannnacgacggcnngcgtgcgnnngcgtttgggtgaaaaggggatatagnnggtgtnnttttctttcaacg

SEQ ID NO: 15696 - DNA, 583 bp, Gossypium hirsutum
  unsure (1)..(583): unsure at all n locations; Clone ID: LIB3829-029-Q6-K6-H7
gtttcaaaggggtaaggcctgagagaaaanaaactattctgatgaagggtctctctacaccctccgtctctgctatctgactcttcatttcagtcgggctctcttggtctttccagttccgactggtgtgtggcatacccaggcaccgcatcaaacagaagcccatctccttccccatgagaaccgcttcataacatgctatcgcttctgcttcaaaagtcgtagtcaccatggaatggaggggccttccatttatcagttttctgggcgtcactaatttgtctctcatttatgccatcaagttcacccagagtacccagataccacaaatcagtgatcgacgttgtgctatagtacaattactgaaaatccaggacaccccacaaaggcatgccgaaggttttcagttccagttctacaccttgaacatatggcagttagggccactctttgctaatgcagattaaccatcgtggggatgaaattccatgataccttccatgccagtatctttattttattaggcagttgtaattcccacagttgtttataaaatgagtgggccgtattatgtgaatcaata

SEQ ID NO: 15697 - DNA, 579 bp, Gossypium hirsutum
  unsure (1)..(579): unsure at all n locations; Clone ID: LIB3829-029-Q6-K6-H8
tccgattctggacaaattgatgcccttgggcaagnacctgctgtaaatctaactcttagattttgctggtcccgaaagcatctactggtctgaggaaattaacgatcttcttatcccaagcgtcaaaatctgaccagacccctgggctcattactgttaacagaccaggtcggcaccatgaaccagggggcgtagccaccacgaacggtggctcgggaagcggctcagtcggcgttcagatccatcaatcccgaaggctcccggatttccttcaaagcgttaatctcaagtacgtaaaactaggctatcactatttaatttccaatcttttgaccctgtgttttattcctctcatcgcggtgatctcaatcgaagtttctcaaatgaatctcgatgatttacgccagttatgggttcaccttcagtacaacctggctagcataatcatttgttctgctatcttagtctttgggttaacagtctacatcatgactcgacccagacccgtttaccttgttaactattcttgctaccgtgctcccgaccatcttaaggcgccctacggtcgttttatggatc

SEQ ID NO: 15698 - DNA, 561 bp, Gossypium hirsutum
  Clone ID: LIB3829-029-Q6-N6-A10
tttttttttttttttttttttttttttttttttttttttttttttttttttttttttttttttttttatttttattttttttatttggttaattgtttaaatgattaaaaatttttaaaatgttttttttttttttaaaaaaaaaaaaagggaaaaaaaaaaaaaaaaaaaaaagggaaaaggggtaaagaaaaaaaaaaaaaaaaaaaagggggaaaaaaaaaaaaaaaaaaaaaaagggggagggggggaagggaaaaaaaaaaaaaggggaaaaaggggggggggggtggagaaaaaaaaaaaaaaaaaaaggggggaaaaaaagggaagggggaaaaggggggggggaaaaaaaaaaaaaaaggggggggaagaaaaaaaaaaaaaaatttgggggggggggggaaaaagggggggggggaaaatggggggggggggcaaaaatggaaaaaaaaaaaaagggggggggcccgaaaaattgggggggggggggctagggggggggggaaaagaaagggaaaaaaaaggggggttggggggaaaattgaaagagagggg

SEQ ID NO: 15699 - DNA, 582 bp, Gossypium hirsutum
  Clone ID: LIB3829-029-Q6-N6-A11
aaaaaggaaaaggtcatttcataagcaaatatgtaagaattcagacagtcaaaaaccatttttttcaatcagaaagccacaatcttacaaatcagccagtaccattgttgatgctgtttgctaacttggagaagacggaatatgaaaaatagaggaatgaagtgcatgcacttaaaagaggcaaattcataggaattagagctattctcttttgcttgaaaagagattaatgggattggagattggaataggtgcttcttctagtcatcgtactaactcgaaaatttgttgcccgaccgaaacatagaaatctcagattttgatttgaaaatttttaacttccgatctaaatgacgaagctttaatgaagtcccatggataattatattctcgccctctttctgatagtgtttgcttgatgtgatgctcattctctttatgaagctctatctggtttttgaatttccaagtgtaagttcgagatcattagctacacattcctcgtggatcttttctccttcccaaggcttcactaaccctgtcatgttactgccaaaggcaaactcggcagcaatagcatca

SEQ ID NO: 15700 - DNA, 483 bp, Gossypium hirsutum
  Clone ID: LIB3829-029-Q6-N6-A12
aaagggggaaaaaggaaagcgggggaaaacgggggacaaaacggggggaggggggaaagggcaaaagggggggaaaaaaaaaaaaaagagggaccgaagggaaaaaggggaaccggggggaaactaaaaaaaaaaaaaaacccaaaaaaaaaaagaggggggaagggggagggaaaaaggggggaaaccaaaaaaaaaaggggaaaaaaaaaaagggggaaggcccggggaaaaaccgttcggggaggggaaccaagggggggggccaaaaaaaaaaaaaaaacggcccccagagaagggcccaaaagggttgggccccgaggggggggaagggggcaaaaaagggggggggaaaccagggggccaaaaaaaaggggggggaaggaaaaaagcggggaaaccccccaacggggaaaggcccggggggggggaaaaaccggggggaagggaaaaaaaggggggaaaggaacagggggggggccg

SEQ ID NO: 15701 - DNA, 404 bp, Gossypium hirsutum
  Clone ID: LIB3829-029-Q6-N6-A7
aaaaaggaaaatgggttacttccagggccctcaataaaagcaaaattctcaaacattttgggaacacaacattgacagagaggacccaattaagggggaaagaaaacaaataaaaaaaaggaaaaggaaaatgaagggggggcatcatatgtatgaaattaaaaaccctcgaaaacagccaaagctggattttaaaacgggggcttcccccactgggggggcttcacaacttcccaggggaagcccgggtcgccccttccaaagggcccggaggcaggtgtcttaaaaaaccggccattgcccccccttttgaaacccaggttgggggggaccaaaccggccctgaagccaaagttctccttcacaatttggaggatttctttggcaggaatttttccagttcc

SEQ ID NO: 15702 - DNA, 579 bp, Gossypium hirsutum
  unsure (1)..(579): unsure at all n locations; Clone ID: LIB3829-029-Q6-N6-A8
attcacattctttgtcattgctcatacactgaagatatgatacaagcttaagctcgaaagtagatagatccccttcagtagcttagttaccctactaaaactgcaataattgaaaaccaacaaagataaaagataataactttttctacattgccaaaatatcatttttggtcccttgttttttctctgcaaatgatttttaggtctctttttgaagccaaactattacatcggaaatgagcctccagcagtcaagatctgctgttcaagctggaacaaagattcaagcttggttttcacaagcgaatactcatgcctcacttgttgcagacatttaagacacccttcgacgttctgctcctcgcagtagttgcggaaggctatgcagactttctgaactctctgagcgccaatgctggagctactacctttcaactggtgaacatgagcatcaatccttttgtaatctatgttctgctgctctagagctctagccagttcattgagaagtctttcagaatcttcaaagaanagagacaccacttcaaccacaaaatctgggttgttttcatcttgaag

SEQ ID NO: 15703 - DNA, 488 bp, Gossypium hirsutum
  unsure (1)..(488): unsure at all n locations; Clone ID: LIB3829-029-Q6-N6-B10
gacaatacagttcttaactcttttctagattgaccattatcatagtcatcatcatcattgatttcattgtcaaccctttnacaagggaaaattttcgctatagattcaacctttaagaggatatgtcaaaatgtgctacacactaaaactatacttacgaaaaaaaaaggagatttggaagagaaccggcagactggaaccgtttttgtgttcttttacttaaaatatcttgaaaagcagtccaccgtgtgtggcgaagaagggtgcaaagacaagtgattcaacagccattagcttgatgaggatgttcagtgatggtccggatgtatcctttaaagggtccccaatggtgtcaccgataacagctgccttatgtggttctgatcctttgggaccaagagttcttgcatgttctgaagcaccggcctcgatatacttcttagcattatcccaagcaccccctgtgttcgatgcggagatagcaatct

SEQ ID NO: 15704 - DNA, 418 bp, Gossypium hirsutum
  Clone ID: LIB3829-029-Q6-N6-B11
atactcactataaacataatcattaaaaatcggctcctaagaacaacaaagtatttcagcaatatcaccatagagagtattgcaaatggtgtctcctatgggtcctaatcactcaatttttttaactcacagtaagacaatatggacccaacacatttttcatcaagttttcatggaattcagaggaaataccttctgaatgaattgcaagaaccgttgcgagtaaaacgtagggtcgacggcagatatggatagtgaatcgaactgaagagatttataggcatgttcaatcttcttagtcatgttatactcttgtaaaatgtcaatgattcccagatataacacaacgtcatatgattcatggaacatgttttcttcttttcctggaatctgttcggctcttgctggcatgttcact

SEQ ID NO: 15705 - DNA, 450 bp, Gossypium hirsutum
  Clone ID: LIB3829-029-Q6-N6-B12
ggagtgaaaaggattgttggatcgcttcaaaatgccacattttgtttcttttacaatcctgcagtcaactagatgtttggaataaacaacagcatgtagggatagatagattacgacagaattaagttccacaaataacactacataggttacaagtattaaattagaagaatgaagcggttggttgttgatgttcactcatttctccgcattttgatattaagtggaacttccttgtatgactgcactttctcgactgctttgcgtaatggtaatggccttgcagcgatcgaacttctgctttcagctcttgggttactacgagcttcttccatgctaagagatgaagctgctaattcatgcatcgggagtatcaagggtgaggcggccacataggtccgagggcaatcaatctcaaatagatatctctgcctcttggggatttaaaac

SEQ ID NO: 15706 - DNA, 89 bp, Gossypium hirsutum
  Clone ID: LIB3829-029-Q6-N6-B7
ctctctctctctctctctctctctctctctctctctctctctctctctctctctctctctctctctctctctctctctctctctctctc

SEQ ID NO: 15707 - DNA, 461 bp, Gossypium hirsutum
  Clone ID: LIB3829-029-Q6-N6-B8
aaattaacctgcttgccactaagaatttgatagctaagtcaagtgttttgatactaccaacattttcaactaatacaacctaccaagataattgtatataataatataattttcataaagaaaggcattttagaagttcataccttgagctatgaatggcttaacctttcttttctacatcaactttcaccatactataagccatcatcaagtagtattttcatcttcacgtgtttcacccaccctgattcgcttcgttgaaccggtagaagctttagttggtgcaacagctagtcgtttcaggcggtaactaacaagtgagggaccgaaaatgctgtactttccggaactgctgaaggccatttctgcatctgctcggcttttgaaaaccactttgggctcgggtgctcttttttgaacacttcagcacctggtgaaaccaatggcccgtaagggctaaa

SEQ ID NO: 15708 - DNA, 349 bp, Gossypium hirsutum
  Clone ID: LIB3829-029-Q6-N6-B9
ccatcattagaataataacagtataagtaaaagccatgtgatgggataatccagatataagcctacacaattttcttagcaatgaagagcagcaagtctgaaaaggatcttagcagcagagaagggaacaggaaaggaaaagaaaaaaagagttaaatgagaatcttgtaagaaaaagctaagacatcatgacctgattgcatgactctagggcttgggtggcgaaaaacctcacatccacatcaggatcctcactcaattcaactaagcatggacggattgtcttctccaccacagatggatgaacagtaggaataagggactgcagcaccttggccacattaaactt

SEQ ID NO: 15709 - DNA, 557 bp, Gossypium hirsutum
  Clone ID: LIB3829-029-Q6-N6-C10
ggctataaagtttgtcctccttccattgcatataatttacgagtaaaataaagagtgtctatatatcaacgaaaatagaatgacaaaaataaagaaatagcataaataattcaggaacatgatctgcaactgctgaaaatctcaccccgcattatatcaatggccatatgttcatgggtgtaccgctctggacctaaataaacacccgtcttctctaaaagtgtaagtgcttcttctttcccatatcttgaggcataaagcttcaggtattcaaagtcctgcaagccgctgagaatgcgctctagtctaagggaagcaacaggtttctttgaagacgagaacacctcacctgggtagtacaaaacaccatcacctggggggaggcctcgcctaaatcttatctcggcactgggaactgttgccttctcgtagcagttggcaccccaatacagaaaaccagttccaccttccttccacacacgccacataacagcacgatgctgtgttcctcgcattcccagatgccagtttggatgaggatcggatggacccatgca

SEQ ID NO: 15710 - DNA, 501 bp, Gossypium hirsutum
  Clone ID: LIB3829-029-Q6-N6-C12
ctcaataaaattatagaggtcatcgtaagttttcccccctacgcataaaaagtacttagcatagataaagcaaataaaaccatcatagaaataaggaaaaacagaaagtaacttaaccaaatccaagatgctgcgggcgttgcccaattaaaacagtagcactgaagtcaacaaactaaacacacttaatcagtcccttcacataagagttacatccttgcagcacttaactcctgctccgtcggcgttcccttgcaccatttccattagcatatggcaattcctcacgaccacggtatggtggagacctgctgtagctacgaccacgaggagagggactgcgacgcctaggggatcgtccacgaggactgtaacttctgcgcccatagcttgggctcctacgatatctagggctgcggctgcgacgtcttccggaaccaccacgtgtacgacattctcgagcaaaatgaccagcctcaccacactcgtagcacttcaaat

SEQ ID NO: 15711 - DNA, 545 bp, Gossypium hirsutum
  Clone ID: LIB3829-029-Q6-N6-C7
gcagtggaaataataataataataataataataataataatccaatcccaaagttgaaagaatatataagtataaatttggagtttgtataaagtttcatcaaggataaatgggagaaccataaaaagttaaaaaacgctttggtggggtaagctatgaattcttgaaagtaattgcttgtgcttttcaaaggagactacaaactaagagaaataaaagccagaagggaggcgtttatgcttcccatcctctcaggatagttgcacgggcaacacggttcaccccaagtgtaaatgcgcccatccggagattgcagtcgtgcgactggcacatgttcttgatgttatgaaaagctttagtcatgtatttcttcagctcctggttcactttctcttcatcccacatgaaaccttgaatgttctgaacccactcaaagtagctgacagtcacccctcctgcatttgcatatatatcgggtagtattattactcctttctttgatagaatctcatctgcttctggatctgtaggatggtttgctgcct

SEQ ID NO: 15712 - DNA, 509 bp, Gossypium hirsutum
  Clone ID: LIB3829-029-Q6-N6-C9
gcgaaaataatggcttactcattcactggaatgctaaaagattctaattcatataacacgacagaataattcatcaaactatgcgctgccacgaaagattggaagtgcaattatcagagaaaatgccagttttacaaccatgaaagcaagctgtttcatgatatccatagccgtttgccactaacttgcggcggaagcagctttaaggttcgttaccgcgacaatatatgcattccaagcatcttcttgttggaaagtttttacctcttcatacttcacatctcgcccgctgccgaatccctctgtgcttctgttttcactagtgtctggcatcttccgaagccagaaatggacagattgaaatccagcctcttctaagcagtctctaatctctggcaatgaccacagcctccaactgtaagaaaatgcatggcgaagtttcttctgctgcttttgaagatggaaatggagactaatccttgttttgcgttcaatgatgttgaattcag

SEQ ID NO: 15713 - DNA, 444 bp, Gossypium hirsutum
  unsure (1)..(444): unsure at all n locations; Clone ID: LIB3829-029-Q6-N6-D10
aaaatgaatcatagtttattacacaatcatcatcaatcatattttaacataaaacaagcttgaaaaggtttaaaagaaaaacctgtgcatacttgcccttctttcaacaaagaaaggtatcacattcacatacactcaccctttctttcaacaaagaaaggtatcacattcacatacttatatagtctacataccatcatcatcctcttaaggctttgcttgcaaaaggcaagccaaatcaatggtgatggattataagggatatgggaacctaaaaatctatcaaggtcagctttgatgatatttataacatgtcatgcagaataaatattgtctttagctaagctaaatttggttaagagggtgtataaatcctactgactaccttgcacttgctctatttggttatcattatttggggggtggncattcctactgggaatt

SEQ ID NO: 15714 - DNA, 440 bp, Gossypium hirsutum
  Clone ID: LIB3829-029-Q6-N6-D12
aggaagaaagtgaagtgggaaattttattttcatctattaccgatacccgagtatataatagaccacaagcatcaaatgtggaaaacatgacatacattactcgctagaaaagaaatagaaacgggtatcaccaccacaaaaaaagtagaaatgcaataaaattaacacaacatagtggaagacgaaacagtgctggtaaaagttttatgcaaggatttcctccaatggcttggcttcaagcttgggcttctcattctcagcctccttctccttcaactgttgctgctctttggccaccttcttcagcctggcaagctcaagatctttgctcatcttcctcctatacatctcagcaaatgggatgggctcctcaaggattgggttctctccctctctgatcttcaagggatacactgtgggatcgggtgctggattttgg

SEQ ID NO: 15715 - DNA, 429 bp, Gossypium hirsutum
  Clone ID: LIB3829-029-Q6-N6-D9
gttaacttaaaaaactattttattttatttatttctaaactacacgcattcttgaattcttctttatatatatataaaccaaaataccatataccctatcataaaagctactaaccctacatctttttccatcaaaacaaacactattttgagagaaaacttggactaaattttcagtaagtccattcttgaggcaagtttaagcttccatctggtctataatttcttcttgcttgtgtcaagagtgcatttcttcttgctaccaaggcatcatagtttgatgcaaaagtgggattgaattgaggttgaacatggttattggtatcatcgaagttgagatttaaagcttgaacaacctttgctgggagtaacaccgctgaacaacctggattctttctagggtcatgagtgggggggttgggggggttg

SEQ ID NO: 15716 - DNA, 548 bp, Gossypium hirsutum
  Clone ID: LIB3829-029-Q6-N6-E10
gatcttcaactaatatcattaccttaaaaataaaaaacacaaggaccttcaactaatagaaggttttgccactttaatggctaaacatcatgaaataaaaagaaaaccagacaacaccaaaggcagaatggttaactggacccaaatcagaaaccaccacggaggcgaaggacaagatgcagagtagactccttctggatattgtagtcagctagagttcgaccgtcctccaactgcttcccagcaaagatcaacctctgctgatccgggggaattccctccttgtcctgaatctttgcttttacattgtcaatcgtatcagaactctcaacttccaaggtaatagtctttcctgtgagggtcttcacaaaaatttgcataccaccacgaagacgcaacaccaaatggagggtagactccttttgaatgttatagtctgcaagggttctgccatcttcaagctgtttcccagcaaaaattaacctctgctggtcaggtgggatgccctccttgtcctgaatcttggccttaacgttatcaattgtatc

SEQ ID NO: 15717 - DNA, 593 bp, Gossypium hirsutum
  unsure (1)..(593): unsure at all n locations; Clone ID: LIB3829-029-Q6-N6-E11
ggtaacaatttatttcctttagattctcaaaatgttttgagcatctaagcaatgcaatcaatccattttcttaatngaaaaaaattatcaacttgcaatngaaaaataatcaataatttcttaaagatgagagcactagtccactacattatctgggaatataaaatgacagcttcaaccaaatatctcaccagatttttttgagaaaagacaccatgaccgaacaagctagtctatcaatgcaggtctttaaaacttgtagaggcaattttatgttctctatctttcttattttaccgcatcaaaggaagtaaccatctcatctctgctccatttccgttggataagtagtacacttttttccagctttcctccgagaatgcttcccttcttacaagcctttgcctgacgtagtaatggcaaacagttgctgcctcatcaggactgtaacgaggcatgttaacacgggcaccaacaggtatatctggcaaatctaaacgaagttttcccacagcagttgaatgagagaatgcaccaaccatcatgtcctcatgcatcatggacctaaaggcattcaccattgcaagttctct

SEQ ID NO: 15718 - DNA, 568 bp, Gossypium hirsutum
  Clone ID: LIB3829-029-Q6-N6-E12
aaacacaaaaatttagcatacattataaaattaaacaaacgagattcagtgcatagttttcagtctcaaaccaataagttgaaatatatgctaaacaaagttctctaatgaaatcatcaaggtgacttgtcaccagagagcttcacttcttcttttctccacctccagggtgagccctcatcttgcggagcacactagacatctcctcacgcttcttctttgcccttttgtgagttcccaactttcttttagcaaccttgagcgctcgtttgtccttaccaactttcagaagttcagtaatcctcttctcatatggtgcaaaaccagcaacttccctaatcaagttcctcacaaaatggactcttttgctagtttttcctttccgattagagggacgtggagccaactccttcttggttacaacatggcccttgttcagtcccacaaagaggccagtatttggcggccattcatgcaaaggctgaaaaaacaacacaaatgaaaggtgaaatgaaggaaagaactttgaagaggtttctgctttcccaaaagaatgtagtttataccg

SEQ ID NO: 15719 - DNA, 535 bp, Gossypium hirsutum
  Clone ID: LIB3829-029-Q6-N6-E7
gttcaagttatagctgcaatagattaatcattttttgttcaaaatccattcattgtccagaagcacacaaactgtaaatatatggataaagcgaacagtgaaagacaagcagtacaatctcatcaacaacaattctctgaccaaatcatagactttatttgtttctgaagcttgcagataaaagactagtattcgcagacaaatggagctctgacatgatggtcgcagcagtaaaggccgggttgctgagtgaagccctgttttttgagcatctgcctggccttcagaacaagctctttattagtaattgagccatctgagtcggcaattatggtttgaatagcattgctaagtgctccataagctttgcttgcattccctgatgggctggcatccgctgaagtttggtcggtctggcagccgctgataagaattccactgtcaggaagagagtgcttaccagctcctgcataagcctcttgcttgctactcacttcagtctcaagtgccggtttaccgtatccttcgtcatcat

SEQ ID NO: 15720 - DNA, 593 bp, Gossypium hirsutum
  Clone ID: LIB3829-029-Q6-N6-E8
ttttttttttttttttttttttttttttttttttttttttttttttttttttttttttttttttttttttttttttttacccacctgtttgtgaacccgggggtaccgcccgggaaatcagaaccgggaccagggaggggaaaaaaagtccccaaagggaaggggaaaaaagggggggggaacaaagggaaaaagcggcccccgggggaaaagggaagcccggggcgactacccagggaaaaaaaacggggaaaaaaaaggggaaaaaccgggggggccaaagggggggacaacccaaagaaaagggggggggcgaaagggccgccttgcaaggagaaaaaacggggggaaaggggggtaaagggaggggccaaacgccggggaaagggggcccccggagagggcccccggggggctggcccttccaccaggggcaaagggcaaaaaccgaaaggccttccaagcaggggccttgaaagaggcaaccaggggggccccagcggggtttcaccaggggggaaaaaagccggggggggggggggggacaagggggaaaaaaaaaagaaagcggggcggggtggggggggggggcc

SEQ ID NO: 15721 - DNA, 557 bp, Gossypium hirsutum
  Clone ID: LIB3829-029-Q6-N6-E9
gtcgaaatgatagcagatatcaaataagcaaacaatgttacatgatgcatcatcataggtgatataaacatagggatctgcaataaaacgtagtccatgaatgcttttacttggtctttaagatgtcatggaatgaagcaggcttcctcctggattcagcacaaagttcctcaattgcagaagccaaacgtagaattgtagcttcaccccatggacggcctattagttgtaaacctattggaagtccttgtttgtcatgaccaacagggacagtaatggcaggaagaccaagaagattagcagcaagaatgaaccgcatgagataacctgaaacctgcatgttcgattctccattttccagagcactaggtggtatttttggtgctgtcatgccagttgttggggtcactatgacatcaaccttcttgaagatctccaggtgatggtgcattatccttcgcctaagacactgggcagcaacatagtctgatgcagtgaatgttcgaaaaagtgccatacaagtgcgagtatcataattcaatttcacacctttccca

SEQ ID NO: 15722 - DNA, 397 bp, Gossypium hirsutum
  Clone ID: LIB3829-029-Q6-N6-F10
tttcttttttttttctttttttttttttttttttttttggaaaaggcaaaggctacttcatttaaaaaatgaatatggagtttgacataaagaccccagtttacatatatgaattggaggaacccaattaaaggactacttcctcttttataatttaccaacaaacacactcttattctatcaaattcattcacttttctgcaaatctgggaaaaaccataatagtttcttcttcttccctttgttttttcattgctccaaaaattaaaagtttggaccagctgccaggatttcctctggcaacttggtgtctttcccaatcttggaattagggaaggtctcaaagttctttttgaatagcccagccaatttcaacagagggttccttgtatgcctt

SEQ ID NO: 15723 - DNA, 500 bp, Gossypium hirsutum
  Clone ID: LIB3829-029-Q6-N6-F11
aacatccaaaacaaaacccgtgatcatcatttttgtaattagtaaatcataatgagcttctaatctaattaatacagataggtagttactatctccaaactataacagatactaaaatatagcatgcaactctagcatagtgaaaacaatgtcctcaaaagggaaaattttcccaaaagataaagctgaataccaatttaagttcttaacaaggctacaataagaaagttaaaaccgaccggcattgcatctgctgctcctcccaagcaactgatttaaaagcattccatatctgagaacaacacgtggcctccagcaaaccacacaatcaattcctgatttcgactagaaaactaggcttctgcagaacgaacttcctttatgacggcatgtatgtagatgtatcaatctgctcaggaagctcctttatatccacctcaaacctctcttggacctggttgagcacatcagaatctgaagcagaagaaacaaacgtaatt

SEQ ID NO: 15724 - DNA, 483 bp, Gossypium hirsutum
  Clone ID: LIB3829-029-Q6-N6-F12
gatgtcaagtggttccttgaatatatttctcaaaagaaaatagaaaccgttgttgataatgatatttaccaacttgataacatttaagtgaggaaaaggctgcaaaaacaactgacgaatcatgctaaaattgaggccttacaatcgcgtatccggtttgcaaatatgttggaatgcagaatcctacaaataccgcgacgaaggaatacaaaagaagtgttaagtgcacataagaatgaatgcagagaatgccctttaatctgttaagagctgcagtgcttggctagcccacaaaggaagaggtgcttgaatcaggagagggaaaccagtaactggatgctgaaaagttaagctctcagcatgaagctcgtgggcttcatatgttctccctttccattcatagacaccctcatatttcacatcccctctaataggaaacccaagatattgggcatgcaatcgaatttgatgcgtccttccact

SEQ ID NO: 15725 - DNA, 426 bp, Gossypium hirsutum
  Clone ID: LIB3829-029-Q6-N6-F8
agggctcatattctgccaaatacttattgacccaattcccagatttacaaaacaaaataaccctttttcagcccccacccacattcaacaaaacctggttactacctacacattcttcctttttattttcacccaaataaccatttcatttcatcttcttaaccctatacttctatactacaatttcatcactattgcaaactaacatctttttttcctacaactacccaaaaagagatcatgaaaacccaaccacccaaagctgctcaatatgtccattcctgagggaacgcaacttcatgggttattccttgatggtgcctgaaattcccctggttttggttccaaccacttccaagtttcaaagcagcatcaatttcgggggggacattagcggtcaaccgaggattaaactgggggtgggcc

SEQ ID NO: 15726 - DNA, 384 bp, Gossypium hirsutum
  Clone ID: LIB3829-029-Q6-N6-G10
ggtagaatagtttgcaaagtaacttattattgccataaatttaatataagttgatacatgaactgaataggcgttaagcttcccgcccacaccatcaaaggcttctagtctttaacaataaacacacaaattcataggattctaaaaaaggaaaaaagaagaagataaaactgcaagccaagtggagcacgaccaattacttaaaaggcatgtttgtttaactttaagcagcaacactatggagcacaacagtctcaacagtgaggccaggtccaaacccaaagagcactccccactccaatccttctcctgtggtctgaagcccatcttcccttgatttcttcctcatctcatccaaaacccacgcgtccgcccacgcgtccg

SEQ ID NO: 15727 - DNA, 564 bp, Gossypium hirsutum
  Clone ID: LIB3829-029-Q6-N6-G11
aactaaaattttcaaaaaatttaattattaatttcaggatcgaaacatccacaaaccaatgatattagcaccccctcaaacattgaaacaaaggaaatcaacctcccacagtcatccgaaaatgttggcactctgtttataaccctccccccacaagcgaacatacgaatttatctaattcatagacttgtagtaaagcatgtatccattcttttcccctccatagggagcttctacctatagcaaaactcttctttcccaatcaaactgcaaaatacgagcaacacgataacagccctgctaaaccctttgacatgcaaccttcaactgcacatggagacttggaagaacccaccggactactttgtttaacaatttccatgctttcatcgcatgaattctggggaagattatcttccctctcatcagatcggcacaaaataaaccttctcttggaatttgatgtgcaattcgggttcggagagctcgagaataatggttccaaggactccattttatcattgttacattcacgcaacttcctcttcaaccccgggaccgggc

SEQ ID NO: 15728 - DNA, 568 bp, Gossypium hirsutum
  Clone ID: LIB3829-029-Q6-N6-G12
aacattatcaaggcatgacggtccaagtgcgtctttttattgaccacatctaaaaaacagggatgtaaatcgtgaatatcatcaatcataagcataacctgctgatagctatgcgacatactagaatccacaactgatacaagcgggaaatggtccaggtagcataacaaatatcatatttaacagacatatctgctcgcttacacaacaagatactgatttattcatatagtagcattactcttttttagtgcctacttgagttccttcagaaagtcctcattgtcaaccagaacagttttccagccatcaggatctaggaaagaggtaattttagtgttgatcccaggaattggccccggtttacgagtaacctttcccccaagctcttgtataacatgttccacaacctcaccgcttttgtatacatcatcagtgctaatagcaacctgtgcatgcatttcccttggtatattcagtcactccgtaattgtaagtcaactcaagaacagtagtctcatgttcttctgcataccccatcatagctatggagtacttatattcaggc

SEQ ID NO: 15729 - DNA, 579 bp, Gossypium hirsutum
  Clone ID: LIB3829-029-Q6-N6-G7
gaaaaaagtggaactcaaaagcacattcaaactttaccctttggaaacaaaatcattaagaaggggggaaaatgttaaagactataccctaaattaagagacaacaaacacaacaaatctcaattagcatgttacttcttcaccatagccagctaaataaaggattgatgccttaccttgcatgaaaatcgactgcaggagtgcaaagatgatatggtgcaggttggctgctgctaagagtattgagtccaaaccacgatgcagtttaggacttctactttgagcttgtttcgatgaacttagtggcacacaagaatgcatatcgctacctactttcgatcttcatggaaaggacttcagattgagaaagcataatagctcatttcattttcattaaagtaatagtcattatagttgagatatccccagaaacacgaaagcccagattctccatgtttaggtgatttgaggtagagtagatgcagttctttaagatttttgtcgaacgtttcttttatgccaagaacctgagatatgttgatcttagaaagtttatcctgtaaatcaccttcagcaagc

SEQ ID NO: 15730 - DNA, 560 bp, Gossypium hirsutum
  Clone ID: LIB3829-029-Q6-N6-G9
aaactaaacttttaaaagtaattctcaaaaatatttttctacatcacttttcaaaaatactttttaaaagtattaccaaactagcaataccagaaaaaactgtgttgagtaataatttctcactcttttattccagaaaaactaatactaggatagcatttcaatcacacatacatacatctccagaagataatagaaactataaacagaaaaaggattgcaatgaaaaggatttttattaccagtactcttcgccatgggaaacaaaattacttcatccctttcccaaaaagcccctgttgaagcctcttgcagtcaaccaggtacgcaaacccgtaggccatgttcttcaaagtagcctcgtacatctccgaatccgacggggccgtcgcatccgttgagaaaaacaccctatatcctttcacaaacgccgcacgcgccgtcgtttcgcagcacagatttgtcatgacccccgtgattataacctcctccacctttttctccatcagcatctcatgtagtcgcgtgttctcgaacgcgctgtacgtgtttttctcaac

SEQ ID NO: 15731 - DNA, 388 bp, Gossypium hirsutum
  Clone ID: LIB3829-029-Q6-N6-H10
atcccgaattcaaccttgttctcttttaagtactataataatgtaaagctacagaaatttcctattataatttacagtaacagtactagattctgaacacacaagctttaacatttaaaagaaaaaaagctacaacttcctctatcatttccccaaattcagccttgaggagcattttccttcagcatttaagacacccattgatgcaaattccattaccagaacttctcagctcaactcctcctgcaccactattggtggtgcgtttggcttgggtcggaggcggcaggattcaggccttctttccccatttgttgcacttcaagtggagatagtatcttgatataccacacgttgttcacgaattcctgccaagggtcatcaccaa

SEQ ID NO: 15732 - DNA, 528 bp, Gossypium hirsutum
  Clone ID: LIB3829-029-Q6-N6-H12
cgagtccaacaacatcaatcttattaatactcactcgcaagtagcaaaagaacaaggtcacatcaaggctcaaatgcaaagcaatgatatgaaaattgttgaggaggtccactctttcgagagaagaattcgaagcgtcatctactgggcagctcatcagtcccccaacaaccaaaggccagtgcagaatcaatttggttgaaggataacatgcttaatctgggtcctattatatgtgtatgtgatgtgaacaagtccattgctagcctcaataacagccggataagagaattccatttccaaattctcttctagtgttaaaacttcattccatgaatcaccatcatctgtggacactgcaactttaagcacacctcttgagattgtattataagcaagcaagatgcgaccgtcgctcaacttaaccccgtcgatacctgagtttgggttgggaagttgagtaggttttgcataatccccattatgaccaccatcgtaggattctgacatacaaactctaccgatgcc

SEQ ID NO: 15733 - DNA, 516 bp, Gossypium hirsutum
  Clone ID: LIB3829-029-Q6-N6-H7
aattaatggtggcacaccaagtatagtaccatgaatattaaaaataacgtgtcattcgctacattgcaaagaatattttcagtatttgtttagatctagaggagttcgcaacccagaactagttctagagggagtggcacgttgtatcaatgatgaaactaatgaaaagcttacggtagaatattccgcagatgaaataaaggcagccttgaagtcaatgggtcccacaaaggctcccggggaggatggcttcccagtaattttctttcagaaatgctggcacatagtaggaaccgagataacatcctttggtctggaaatctttgaacctgatgatgccgataaaatcctgcgtaccccactggcgagcgaagcacatccggacatgatcttctggcgtggggagcactcgggagagttcgcagtgcgtagtacttacaaaatgttacagaaccaaaggcctactacttatcctattgattcacataatacgggccactcattttataaacaact

SEQ ID NO: 15734 - DNA, 431 bp, Gossypium hirsutum
  Clone ID: LIB3829-029-Q6-N6-H8
agagaaaaagataaaataaaacacatttgacaacatgccgagaataagaatgacacaacagtacacatcaagaactatagaaaaaccaaggcacagcggttctgcctaccaatgaaatcctctatttgaatgtagaatctaactcaaaatattgctcagctaggtgtttattttcacaggatacatatcaatgcaatcttcccaaggaccattgctagatgacttaacattccgaagagcttcccaaactgcactattacatttgaagccactcccaaatgcgatttgccaaacacggtttcgcttccgcatcctccccttggcctcaatgtaggccaattcataccaaatggaacttgaagaagtatttccaaaacgatggagtgtcattctagaagcctccacgtgtattggtagcagctgcaggtttt

SEQ ID NO: 15735 - DNA, 458 bp, Gossypium hirsutum
  Clone ID: LIB3829-029-Q6-N6-H9
aactgaaccgatgaaatatgtaattctcttatgcagatttacaaggttgaaagatggataatttatgttcaggggttgaagatgaagttgccacacttgcatttccaacttaagggtttgtaattagagctgtcatctcttcttgcataagcaacatcaaagactgaagttgaagaaggcttgttttgaattctgagttggggatttgtaggcacttgaatggcttcacagtgaccgcatgtactgcatcttctctcacattttggcggccttgaacctatttgaccactcaacaccatcgccttttcttcatttactactctcttatcaaatatgggatttggtttaccttcagctttgtatctagcttgggtcggggttaagatcaagagaaaacgaggagaatatggcaagctctctggggaactatgaaactgggggtggaaaccattttgttt

SEQ ID NO: 15736 - DNA, 592 bp, Gossypium hirsutum
  unsure (1)..(592): unsure at all n locations; Clone ID: LIB3829-030-Q6-K6-A10
ggnctttntctggactggtttaagactctctcatgaacatggctagtctttacagaggggcatcaaggnaaaaacaagcagaagggaagacaccatggattaagccagcagaagaggcaagagattaaggaagcatttgaactgtttgacactgatggctcaggtaccattgatgccaaagagctgaatgttgctatgagggctcttggtttcgaaatgacagaagggcaaatcaatcaaatgattgcggatgttgacaaggatggcagtggtgccattgactttgatgaatttgttcacatgatgactgccaagatcggggagagggacactaaagaagagcttatgaaagcattccaaatcattgatcaagataacaatggaaagatatctgctgacgacgttaaacgcattgcaaaggagcttggtgaacacttctccgaaaaagaattcaggacatgattgaagaagcagaccgagatcatgacggggaggtaagtattgaagagttcatgaggatgatgaagaaaactacatatggctactagaagtttgacttatggccggagggagtgtttgatcgcagccatgc

SEQ ID NO: 15737 - DNA, 588 bp, Gossypium hirsutum
  unsure (1)..(588): unsure at all n locations; Clone ID: LIB3829-030-Q6-K6-A11
tctgagcagnacgttttgngagcggcgaaaacgcgggcgaagaaggaagacatgactgaagaacaaaaaagccttatgaagagatagcaaagaagaacaaggaaaaaacatggaagaaatggaggtttacaagcagaaaaaggaagtagaagcattgaatgttaaaaaacaagaagaagagatgatgaaactacagaaacaagaagcacttcaattgcttaaaaagaaagagaaaactgatcatatcattaaaaaaaccaaagagaaacgtcaacaaaagaagcagcagaattcagatcctaataaacctaaaaagcctgcatcttctttccttttgttcagcaaagaagcaaggaaaactctggtacaagaacgacaaggaatcaacaactctacacttaatgccctgatttcagtgaaatggaaggagcttagtggagaagaaagggatgtttggaatgcgaaagcaagtgaagccatggaagtatacaagaaacaaatggaacaatacaacaaatctgcagaggagaaggagcagcagcactagtgaaagacttttttttaatgttgatgttttaagtgttttgt

SEQ ID NO: 15738 - DNA, 192 bp, Gossypium hirsutum
  Clone ID: LIB3829-030-Q6-K6-A12
gcttcaaaatcatggttggtgctccgttggttgcgtttgtaacaacacacatcttgtatctgaacttctacaaacttgattatggtctaaatatgaaagtttgtatggccaggggtgtggcgcaacttctcatatggggaatttgggccggcataagtagccatccatcacgctggaaggtttggctgtttg

SEQ ID NO: 15739 - DNA, 597 bp, Gossypium hirsutum
  Clone ID: LIB3829-030-Q6-K6-A7
actggttctattccttctagctttgcacagcttcgttccctttgagtgttggacctttcatcaaattcgctatctggtgagattccacaaggtcttcttgatctgagaaacctaacttctcttcagctcaataataataaattctcaggggaaattccttctggtttctcgaacttgaagtctctttctatgcttgaagtatcatccaacgacctgtctggatcattaccattgaatggtaatgcagtgaatcatacaggtgtccatgaaaagcctttacttcgttcacaccatttattctcgctgtctgtacggtctgctgaaacaaccttcactggaagttcacaaattggtgcagcttctccttccagtaataaaattgatgatcaaagtctagattccattgagatcgcatccatagcatctgcctcagccattgtttcagttcttctagttctagtcattctcttcttttacaccaggaaatgggttccaatgtccagggttcaggtttctgaaactagggaaattacagcttttgttgacattggggttccattgacgtatgaagcaattgtccaggcaacagggaacttt

SEQ ID NO: 15740 - DNA, 297 bp, Gossypium hirsutum
  unsure (1)..(297): unsure at all n locations; Clone ID: LIB3829-030-Q6-K6-A8
tggntttcttgtttggactcctaacggaagcagtctgtttaggatttaccgagagtaaaatactggatgttctgaaatcggcactctctgacttttggtggaagcatgttcaaccagctaaagaatatgcagtaaaaatgtgataacagatcccctcagagaattaaaatcactaaggccagactctaggcatgaatcatgtggcgatatagttcgtcaaagcaaacttgtagctgatacctccaatttattgatttgtgaaataaatggacaactgataacctgatttgatgactc

SEQ ID NO: 15741 - DNA, 569 bp, Gossypium hirsutum
  Clone ID: LIB3829-030-Q6-K6-A9
ggctacccctggtcagttccagcttgttaataatgttgtggagaagctcggttatgaagttaaaaggtgagaattacagaaagagtcgtcaatacttactttgcgaaattgtatttgagcaagccagggtgaaaatgatgtcataattgtggatgcacgaccctcagatgccataaatgtggctaacagatgcaaggctccaatatatgtgaacaaacaaattgtcttggcagatgctattagaattggctacgggatgggcagagtgcgtgacaaaaagtctacttatgatgtatctcttgacagtgctgcagatggtcctgatttactattagaggagctggatctggtgaggaatatggatttagctgtcaaagaagaaagatacactgatgcagcaaagttaagagagaaattaatgaagctacgcgatcatggccagtaactgtttactgatgtatccacggttgtacactcattggtggtggttggcttgcttgtggtcgaattctttttgcatttttatgttgttagttctggtgtttcagttcatgctcaaaatgctgtag

SEQ ID NO: 15742 - DNA, 581 bp, Gossypium hirsutum
  Clone ID: LIB3829-030-Q6-K6-B11
agtttataacttaaaatgggcccaaactcaagccttgatgttcaagctcgagttcagcccgtattttaaatgggtctaattttttgccaaaatcatttttttaagcttaatatttttgcttaaaccctcccaaattttggacgaacaacccgacttatgaataggtttgtctagtctcactcccaccatgtgcatatgccatatgtgggttatgtcctattttttttttttcgaattagtctggatttttccgattcttcatctattgtgtgttgtattgattggattctacattgcaatcggtcaggcatatatttgtacttgtagtatacttgtaattgtagttttggcatttcaaattttcactaatgctaaaaggtcaggttttggtccctctattatgccaaattaaaatatgtggaccaaatctctaactttagcatagaagagggaccaaaatcataatttgaccatgttaataaataaatgtaattttagttgaagaacacaaaggaaggtgtctattaatgggattttaatggctttgttgcagattacagaggttagaccagatataagcc

SEQ ID NO: 15743 - DNA, 542 bp, Gossypium hirsutum
  Clone ID: LIB3829-030-Q6-K6-B12
cggccgcgtgggagatgaatgtgagtaatgacaagcaaaccgggaaaatgtggccaatacgtcttgaggacctcattttgtgggaggatgccaattgatgcactcagcagtgcactgtaacatcatattatatggagaccatggaccgcaacctctgatccacgtatgtctacaggcgcaatgactgtaattatgatcttagaggtggaactctatcggactctgctttcaaaggctatgaagcttaagacttagcgaggagtggatccaagctctaatcagacattactcagttcgaagtgcagtgttacgggataatggttgtttgtcagaatcaaaagctgaaaactgacgtaggacacggtgttttggttacagcagtaattaaaaggccagttactcgcttaaaatacatataaactgtgagtgatgcgttgcacattgatgaaagtggtgggaagcttagcatgaccatttttatgcatgaacgtgaactagatcatcttgactggacactgtttttggatctgtacggcacaaca

SEQ ID NO: 15744 - DNA, 589 bp, Gossypium hirsutum
  unsure (1)..(589): unsure at all n locations; Clone ID: LIB3829-030-Q6-K6-B7
gnaaaaccagtctctctctctctaaccatgatctcttcggtctgggcagaaatcagcgaacattccgtccaaaaaaaatgcaccttcaggaagtaagggtgcacangcttaaaaagcacatcgatgccaccttaggcagtggaaacttaagggaagcagttagactacctcctggggaggatttaaatgaatggctcgcagtcaatactgtggatttcttcaatcaggtgaatctgctctatggtaccctcactgagttttgtactcctgagaattgccccacaatgactgcaggacctaagtatgaatatagatgggctgatggtgtgcaaatcaagaagcctatcgaagtttctgctccaaagtacgttgaatatctaatggactggatcgaatcacagcttgatgatgaatccatatttcctcaaaagcttggcgcaccatttcctcccaatttcaaggaggtggtgaagactatattcaaaagactcttccgtgtatacgcccacatctatcactctcactttcagaaaattgtgagcctttaagaggaagctcatctgaatacatgcttcaagcacttcatatt

SEQ ID NO: 15745 - DNA, 583 bp, Gossypium hirsutum
  unsure (1)..(583): unsure at all n locations; Clone ID: LIB3829-030-Q6-K6-B8
gnaaaaggttatgcatggagcagacaggnatattgtgtggcttcaacgagactttggcatatatgtgtgcaatctctttgacactggacaggcctcaaggtcttgaaattggaaagaatagtttggagcatcttctgcaacatttttgtggagttacagccaacaaagagtaccagaatgcagattggagattgcgtcctcttcctgatgaaatgctcagatacgctagagaagacacacactacttactgtacatttatgatttaatgagaatcaaattgttatcaatgccccaggaaggtgaacatttggatgctcctttggtagaggtctacaagcgaagttctgatgtatgtacacaactgtatgggaaagagctcctgacagagaattcatatctccatatacatgggttgcaggtggctggtttcaatgctgagcagctagcagttgttgctgggctttgtgaatggcgagacattattgctcgtgcagaggatgaaagtactggttatgtattgccaaacaaaacgcttcttgaaatcgccaagcagatgcctgtagctgctcacaagttacgtca

SEQ ID NO: 15746 - DNA, 385 bp, Gossypium hirsutum
  Clone ID: LIB3829-030-Q6-K6-B9
ggcccctacactttaggaattgcttctttacaaaaactagggatcgatctatctgtcatgggaagggatatcgacattggggatgatgctcattataatagcccgcttacttcttgttccgacatctctaccactaccaccgagggcacctccatgtcattctgcggtgcgggtcctaaacagagcaagaaggctgcaaaaaacagagcagctatgaaaggctcaaagaaagctgtaggagactcggaaaggaggcaaccgatataccgaggtgtacaaatgcgggatgggggacagagggtgtccgaagtcccacaaccaaaaaagaaatgccgcagatgggtgggggacttaccccgaccggaggaaatggcagcctcgagcc

SEQ ID NO: 15747 - DNA, 506 bp, Gossypium hirsutum
  unsure (1)..(506): unsure at all n locations; Clone ID: LIB3829-030-Q6-K6-C10
aaaaatggttttaagcaacagaagtacctaaagtttcacaagcgctgcctgaatgacaggaagaagctgggaattnatttcctcactgnaannnntnnnnnnnnttnttnntntnntttttntttttttttttttttttttttttttttttttttnttttttttttttttttttttttttttttggggtggttgtgttgtgtggttttttgtttttgttttttttttttttttttttgttttttttttttgtttttttttgtttttttttgtttttttttttttttttgtttttttttttttttttttttgtttttttttttttgtttttgttttgttggttttgtttttggttttgttgttgttgtgttttttgtggtttgttgtttgttttgtttttagtttttttttggttttgtttttttttttttttttttttttttttttggtattgttttttttttgttgtgtttttttagtttttttttttggtttttgttattgttt

SEQ ID NO: 15748 - DNA, 587 bp, Gossypium hirsutum
  Clone ID: LIB3829-030-Q6-K6-C11
aaaggcagcaaataaaaagttaacattaactccggttctttgatgaataatataaatggagaagttaaagagaggatttatcagaatggtactgttcttgcaagtgatcagcaagcagaagggagttctggctcagtcttagaagcaaattggcataattcaagagaaattggttcgtttaaagaatggaaaaacaggctcatctccaaataggcatgtgcttaccaaaggtctgggggagactgctgttgccagatggaatgatatggacaaagtatctcctgctcagaccatagaagcaaatgattcggaaagtaaaggaattggttatgttccagatgaatgggatgaagaatatgacaggggtaagaggaagaagataaggcaaaataagcacaagttcggcggtgcaaatcttttccaacaaatcgccaccaagaaaacacggtttaagaaggctaagttagaccattctaaatcagaaaaccgaccattcaggatatgaagtaaatccattatcaatttggagcaattttgacctgtctgtctgctgttatagtttatgcagtaattcttgctctcttgtt

SEQ ID NO: 15749 - DNA, 328 bp, Gossypium hirsutum
  unsure (1)..(328): unsure at all n locations; Clone ID: LIB3829-030-Q6-K6-C12
cttagcgttgtcgtcgctaaatatgagcaggtttttcgcagaatcttgatgtatgttgaaaacggatattgtttaggccgaaattttttgctgaatatcaaagatgtatgttcctaccattgatccatcttgtcattnngngnngcatcttttgataatnccnacggaatcgccttcaaaaatgatgatgccaccgtgcaatactatattaacttgctccacagcatgctatggcttcagcagcaaaaggagacgaaacaccatcgtgaatttttgagtaagataaaaggacctttccttttcgatctcgaacacaatgcctgaagct

SEQ ID NO: 15750 - DNA, 611 bp, Gossypium hirsutum
  unsure (1)..(611): unsure at all n locations; Clone ID: LIB3829-030-Q6-K6-C7
cggtccggnaatccgggtcgcccagcgccgaaaaagaccaggtcccaccgtacgaggagtaccaaacgccgttcaaaggctaagaggaagctaagaggtctcatcgctgagaagactgtgctccactcatgctccgtctagcgtggcactcagctggaacttttgatgtcaagaccaagaccggaggtccattcggaaccatgaagcaacctgctgagctcgctcatgctgctaacaacggtctcgatattgcagtcaggcttctcgagccgatcaaggagcagttccctatcctttcatacgctgacttctatcagcttgctggtgttgttgctgttgagatcaccggtgggcctgaagttccattccatcctggaagagaggacaagcctcacccaccacctgagggtcgtcttcccaatgctactgagggagctgatcacttgaggcaggtgtttagtcatcaaatgggtcttagcgaccaggacattgttgctctttctggtggccacaccctgggaaggtgccacaaggagaggtctggatttgagggaccatggactaccaaccctcttatctttgacaactcttacttcaaggagctcttgact

SEQ ID NO: 15751 - DNA, 579 bp, Gossypium hirsutum
  unsure (1)..(579): unsure at all n locations; Clone ID: LIB3829-030-Q6-K6-C8
gggnaaatagaattcgtttcctgcagccctacagtgtatcaggccatgctggttgactggatgcggaatcttgaagttggcattcctgctctccttgaggacggaatcaagcttcttgtctatgctggtgaatatgatcttatctgcaactggctcggcaattcaagatgggttcatgcaatgcaatggtctggtcgaaaagaatttgtagcatcgccagaggttccatttgtggttgatggctcggaagcaggagtcttgaaaactcatggacctcttggttttcttaaggttcatgatgctggtcacatggtgcctatggaccagcccaaggcagccttagaaatgctgaaaagatggaccaagggttcactagctgaaggtggtaaggcagagaaactgtttgctgaaatgtgattttttttttcacttttcactgcttgcaatcagtgttagttacccgctgctcttagagtgggaacaacaaaacaaagtaactttgaatacctgtatatatatgtatgtggatgccataggatcctggttatcttggtgttttgattataacctactaaaaat

SEQ ID NO: 15752 - DNA, 575 bp, Gossypium hirsutum
  unsure (1)..(575): unsure at all n locations; Clone ID: LIB3829-030-Q6-K6-C9
aggtctgaccccaaagtgcctccaagactggctcaaacctgcaagtgttccatgtttacagtccatgctcacccttcaaaccctcaaanaccactctcatgggaagaggatgtgctgcaaacgctagccaaggaccaagccagggtgcagtttttgtccagcctggtggctaagaaatctgtggtgcctatagcttcaggcaggcagattgtgcaaagcccaacttacattgtgaaggccaatattggaaccccacctcagcccatgcttatggccatggatacaagcagtgatgctgcttgggtgccttgcactggctgcattggctgctcttctactgcttttgactttgctaaatccaccactttcaagacccttggctgccaagctgctcaatgcaagcaggtaccaaaccccacttgcggcggaagcgcgtgcgcattcaacatgacctacggtggctcaaccatagccggtaacctatcacaggacaccataaccttagccaccgacccaatcccaaactacactnttcggttgcctccaaaagacagcaggcagctcagtgccaccac

SEQ ID NO: 15753 - DNA, 441 bp, Gossypium hirsutum
  Clone ID: LIB3829-030-Q6-K6-D11
gctttccttaaaacccttgacttgaatttctctaatcgaccatccaatgctggtgccacccacatagcctataactctcaagacatggtgtttgctgagtatggtccgaggtggaaattgcttcgtaaactgagtaacctccacatgcttggtggcaaagcccttgaggattggtcccaagtccgggctgttgagctaggccacatgcttcgggccatgtgggagtctagccgaaagggtgagccagtggtggtgccggaaatgttgacgtatgccatggccaacatgatcggggaagtgatactgagtcggcgagtattcgtgaccaaagggtcggagtcgaacgacttcaaagacatggtggcggatctcatgacgtccgcgggcctcttcaatattggtgactttataccttccattgcgtggatggctttacaaggg

SEQ ID NO: 15754 - DNA, 597 bp, Gossypium hirsutum
  unsure (1)..(597): unsure at all n locations; Clone ID: LIB3829-030-Q6-K6-D7
cggncgcgtgggcggccgcgtgggcggacgcgtggggcagtctgatcatagaggagttgggcctgtgtcatctgaagatggatacaactggagaagtatggacagaaactgtgaaaggatgtgaatttccacgcagttattacaaatgtacacatcctaattgtgaagtgaaaaagctgtttgagcgatctcatgatggacagattactgagataatatacaaaggtacacatgatcatcctaaacctcagcctagccgccgatattcttctggtaatatcatgtctggccaagaagaaagatctgacaaggtctcatctttgaatggtagagatgacaagtcatattgcggttatggccagatggctcatagtattgagccaaatagtactgcagatatatctcctgtcacagctaatgatgataatttagatgaggttgaagatgatgatccattctcgaaacggaggaagatggatggtgggattgatatcactcctgtggtgaagccaatccgggaaccacgtgttgttgttcagactgtgagtgaagttgatatactggatgatgggtatcgttggcgcaaatatgggcaaa

SEQ ID NO: 15755 - DNA, 574 bp, Gossypium hirsutum
  Clone ID: LIB3829-030-Q6-K6-D8
aaagttccaaccaaagaaaggcccgaactgagtccaccaccactgctcaagactcagccaccgcagaaacggagccccaccagactcaggctcaatcccaaatagatgaaaccgccgccaagctcaataatcttactctccgaatttggccccccactcaacgaacccgcgatgccgttatcaaccgtcttgtcgagacgctctcttcccaatctgtactttccaaacgctacggcaccatccccgaggacgaggccgcctccctggccaaatctatcgaggaggaggctttctcagccgccggtgcggccttctcccccgacgatgatggcatcgagatccttcagatgtattccaaggagatcagcaagcgtatgctcgatactgtcaaatctcgcgctgctactgccgctgccgccgatgctccgtcagccacggaagcagcgaatggtgaggaggtttcatcgtcgtccgtgaaggcggaggcttgagtttaaggatcctcatttctctctttctctctctttagggcttttctttagattgatgatcggtcttgctagggtttttaaag

SEQ ID NO: 15756 - DNA, 270 bp, Gossypium hirsutum
  Clone ID: LIB3829-030-Q6-K6-D9
ccctcaaactgctggcctactgcgggtgctttaaccaaattaaatacaaccttgacgatgcattatgcgattctactacatagcaacagcaaaacccttctgctgtgtctggtggaccgcttctcttatgcatgtaataccaagcaatggaacaaatgatcttttcctgagtgatactacatattatatgttaaccaggtgtaaaaacattatattggaaacacttcgaatatgacctttttatgtaataactgataaaaaaggccatgt

SEQ ID NO: 15757 - DNA, 592 bp, Gossypium hirsutum
  unsure (1)..(592): unsure at all n locations; Clone ID: LIB3829-030-Q6-K6-E10
attcctgccttagtttcattggaagcgggactctcagactactctttcgaaccagctccnaccatcacccccaaaaaacaaagcaaattgtagaagatggcaacacaagcacttgtatcatcgtctcttacctactcagtggagactgcaaggcagattcttggagctaaacgacaaattgggccttcaaggaaaggatcctttgttgttaaggcagcttcgactccacccgttaagcaaggagctgatagacctttatggtttgcatctaaacaaagcctttcatacttggatggcagccttccaggtgattatggatttgaccccttgggactctcagaccctgaaggtccaggagggttcatcgagcctaaatggctagcctacggtgagatcatcaacgggcgttatgctatgttgggtgcagtaggtgcgattgcccctgaaatacttgggaaggccggtcttatcccagcagaaacagccctcccttggtttagaaccggtgtgatcccaccagcaggaacatacagctattgggcagacccttacactntgttttgtgttcgagatggcactcatgggatttgca

SEQ ID NO: 15758 - DNA, 228 bp, Gossypium hirsutum
  unsure (1)..(228): unsure at all n locations; Clone ID: LIB3829-030-Q6-K6-E12
cgagattctttgagaaagattaacacaaaatattttttcctaccccgaaaanaacganatcgttagagagagaaagaaaggagaacaagatcgaaggtagaaagagggtcgattcttcgttgctgttatatttaaaaataaacgacaacgatgaagaacactgaaagactcgccaacttggctttagcagggttgacattggcaccacttgtccgtgaagtagatcct

SEQ ID NO: 15759 - DNA, 599 bp, Gossypium hirsutum
  unsure (1)..(599): unsure at all n locations; Clone ID: LIB3829-030-Q6-K6-E8
cccggngtcgacccacgccgtccgcgnatnattccaannntgccgtctctgnactgggtagcacaaacgagnaagccaaacaacgagtcaacctccagctttgagattggacagcttgaattgagatccataaagcgaaattgcaagctttgtgatcaaaagcttgcatatggatatggaacagccaacaggtcattggtgtacaggcctgcaatgctttcaatggtagcagttgccgcagtatgcgtctgtgttgccctactatttaagagctgtcccgaagttctatacatcttccgtcccttcaggtgggaattgttggactacggaacaagctgaggtccagcaactcgccctaagtcggtaacctttaataggtggtgtttgtatttgtaatatgtttgtaatagactgcaaagctgggatctggtgtataacaccagtgtttggactgagtctcagacacagtagtctcgtcggcatatatattatttgttgttcaatcatcaatgtaacgtttatccagggtataacatgataacacatgcatagttctccctctggagtctgaggttcatgtcttcaacatttgataatgg

SEQ ID NO: 15760 - DNA, 561 bp, Gossypium hirsutum
  unsure (1)..(561): unsure at all n locations; Clone ID: LIB3829-030-Q6-K6-E9
cggncgcgtgggctttctcaaccgtaccanagnagnaaagcgaccgcttggaaacaaaaaaagaggaatgagagaagaagnagaagatccgcagaaacttaagagaatagcggcggcagcctacgactacgagaacgatccccgatgggcagattattggtcaaatatcttgattcctcctcacttggcttctcgctctgatgttgttgatcacttcaagcgcaagttctaccagcgctatatcgatcatgatcttgtggtagagtccatgccatcaaacaaaccatcgcaatcagcaaagtcttctgcttcatcctcaacttcatcgtctgcagtaaataatggggttcgacctcgcaatgcaggttcggcctctataagttcaggggcatcagcagctgctggttcaaatagaacttctatgcattgggatcgacaaacactacaattttctgtcaatgcttgggtgtttattgttgctgtgctagccatctttccacttgttcctagaagtctttcgtacagggcttaccggctgtcatttgtgggcactgcttgttc

SEQ ID NO: 15761 - DNA, 579 bp, Gossypium hirsutum
  Clone ID: LIB3829-030-Q6-K6-F11
gcttcactcgttctcggtcgttttcctttactggttctatgttttctcaagcctacccctttgttcatcaatgtgatcgtttaaagctaagttgtagttagtagattagtttctgtgatctattgaaagaaattaaaatctctaaattttcatttaatttgttaaaaataattttcctcccacctgagatggctactgtgcaaaaaccggcgagttcctccgaatccgacccaagatgcgccaacatcgacgagaagaaaaggaagaggatgctgtcgaaccgtgaatcagcgaggcgatcgcgtatgaagaaacaaaagctactcgaagatttagttaacgaagtgagtgcattgcagaaaaataacacccagatctgtgaaaagatcaagttcacaacccaacgcttcgtcaaaatggaagcttccaacagtgtcttaagagctcaaataattgaattgaccgagagcttgcagtccttgaactcgatactgcacatggcggaagacggaagcgggtacgacgtcgatatcccggagatcttcgttcctctgatgaagccatggcaactcccttgtt

SEQ ID NO: 15762 - DNA, 580 bp, Gossypium hirsutum
  unsure (1)..(580): unsure at all n locations; Clone ID: LIB3829-030-Q6-K6-F8
gcaagnatttcacttgnaggaagccagtaagcaactggaagctgatttggaagaagctgaagttgctaaagaagctgagataagagcacttgatcagatgaagatgctttccgaaaaactagtgctgctcgtacctcgacctcggaatctggagccaatgtcaccatctccagggaagaatttgaggccttgagccataaagtggaagaatccgataatttagctgaaatgaaagtgatagctgccattgctcaagtggaagctataaaggctagtgaaagcgaggtcctcaaaaggttagaggcgactcaaaaagagattgaagacatgaaggttgcaactgccgatgctttgaagagggctgagatggctgaagcagcaaagagagcggtggaaggggagctccgtaggtggcgtgaaagggaacagaaaaaagcagctgaagctgcatccaggatcctagcagaagcacaaatgtcaactgaatcatccccacaacactatagacttcaaaagccgaacccaccagagaaaattcaggtacataagttggaaaaaaagaggtcttccatctcgaaaa

SEQ ID NO: 15763 - DNA, 436 bp, Gossypium hirsutum
  unsure (1)..(436): unsure at all n locations; Clone ID: LIB3829-030-Q6-K6-G10
ggcccaccacaaaaaagttggnaacaccagaggtaatgaagcgtcaactacagtgcagtagatgcaagggtttagggcacaacaagtccacttgcaaagagctcttgtagagtgttggccactggatcgagttaaggatgacacagtttggctgatggatctaatggtacttcttcaatgtcaaatagttttattaggtgtaatgctagttctacttggtctctagttaaaaactttatgattaatgaacatggcagtgactcgtagggaaggattggttatttaaagtagctatttgtatccatgttgatggaaagctaaatgttaccatcgacttggatcaaattttgttactgtattatcagaaagagattggttaggttttctacctcagtttttaacttttttaatttggaaaaggaacacgttcattcac

SEQ ID NO: 15764 - DNA, 587 bp, Gossypium hirsutum
  unsure (1)..(587): unsure at all n locations; Clone ID: LIB3829-030-Q6-K6-G12
cggtccgnattccgggtcgcccacctccgcctcctcaccgtcatatccactttttcctcttctacatttctcagatcttttttagggcttcactctcctcgctgcttttctttatgtctnacctgataatcatggatgcacactgttatgtggcctgagttgttgttctttatctataaaacagctttcgtgatggtgaaagcatatgcgcaagagcacatttacaaacatccatgggagcgagtaacttctgcatcttggcgtaagtttgctgaccctgaaaacaagcgtaccttgtctcatattctagaagttgacacattgaatcgcaaactcgatcctctctctggtaagctttacactactcgggctcttaccatccatgctccagggccatggtttgttcgcaaaatcattggccaggacatctgccactgtgttgaatcaacagtggttgatgcccaatcaaagtcaatgcagcttacaacccgtaatgtcagtcttcagaagtttatagaagtagaggagaagataaggtatgatcctcacccagataatccaacaggatggaccatttgtcgacagga

SEQ ID NO: 15765 - DNA, 445 bp, Gossypium hirsutum
  Clone ID: LIB3829-030-Q6-K6-G7
tcgattgttctgtctttgttgttggtgataacagtggttgatgggttgggaagggaggatgaggataaacgatgtgaagaacaacaaagaggtgcaagagcttgggaggttctcggtggaggagtataacaggcggagccaagggcggttgcgtttcagtttggccaatggtgggccgtcgacggcgttggttttctctcaagtggtgggagctgagaaacaggtggttgctgggatcaagtattatctcaagattaaagccatgcaaggtggggtaaccaagacctttgagtcagtggttttggttaaaccttgggttcaatccaaggacttgcttaatttttccccttctactcattaaaaagagaagtctttttcccttgtaatcttaattaataaagcgattgaataagaaagtatggtaattaactgcttgttataccag

SEQ ID NO: 15766 - DNA, 578 bp, Gossypium hirsutum
  Clone ID: LIB3829-030-Q6-K6-G8
gtcgtaatctgtttttgctttattcaatcatagttacgtacttcaataaaaacaaatgaattttaaggcagaattctgtagttttggcatctaatttggaagtatgaatgaaaatacgatatgggttttaagttttaactattaatctggttttgttaagttttatgcaattatagttaacataactcagtttccatgatatttagggatttgcttgattatcatcttgattcagtttttggctttgtagttcaatagctagttgagaaattgggggaaatggaaggggcagtaagggttcaaattctttctcaaatgggcatttcagaggttccgtcacaatacattcaaccccccaagaaccggcctggatctgtaactgaaaatatagctgatttgagctgcaaacatgttcctgccgttgatctatccagtgaaaaggagtccgtccttccagccattcgagaggcttgtagagattggggagcttttcatgttatcaaccatggggtacctacaaaactgttggatgatttgaggagagcctgtttttcttttttcaatgatttcccgatgga

SEQ ID NO: 15767 - DNA, 562 bp, Gossypium hirsutum
  unsure (1)..(562): unsure at all n locations; Clone ID: LIB3829-030-Q6-K6-G9
nagnanaaaaaacagctgtccgcccaaaaccctaacaatcaagagagttgagagggagaaagagacgcagaaggaaactcttcaggggcaaaaaagcagaaaacatccctcccaatcgccatggnaaaagttcctcacattcgcaaaggtaagagagtggtcaaaccatcgaagatgacaaaagagatggacgctgatcgagagttgaccaagttcataaatcactgcaatgagataaaagcggccaccgttgctaacaaggatggaggccaactaagtattgtgaagccacccccagaatcttctggtaatgtgaaggaatagtaatgatgctttgtcaaatagggctccaaattctaacgcaagaaccttcagcatggattagaggagatttttttccccaagtaatgcaacctaaaccagcctttttgtttgaagatcaattctgttgtgaaatgtgtttttgataaaatatagtgtttatctttttgcgcttccatggatagatatgctactagttactatggatatttaactaaaatgcttgggtataataactgaa

SEQ ID NO: 15768 - DNA, 471 bp, Gossypium hirsutum
  Clone ID: LIB3829-030-Q6-K6-H7
tgtgactctctgcccgacaaatgctcttgcgaagttcctcaggagccttcagaattggcagatgagtttggcgtggccgttgtaattacgaaccaagtagttgctcaagtggatggttcagcaatctttgccggtcctcaaattaagcctattggcggtaacatcatggctcatgcttccacaacaagactggctgttcggaagggaagaggagaggaacgtatttgtaaaataataagctcaccttgcttggccgaggctgaagctcgatttcagatttctccaggaggtgtagctgatgttaaagactgagctgtttcagctcaatgttttccaaacaagtagccgcaaagcttcctttaattgatcaatcaatttgttattttgtagccacctgcttcagctaatgagcaaatcacaaaactctgctattttctttctttgcaatgaagcttgccaaaaattggaagc

SEQ ID NO: 15769 - DNA, 553 bp, Gossypium hirsutum
  unsure (1)..(553): unsure at all n locations; Clone ID: LIB3829-030-Q6-K6-H8
gccccacagnagaactggtaacatgggggtttcaaaggtgatcagagctgaccagaagagattcttctttgatcttgggagcaacaacagaggacatttcttgaggatatctgaagttgcaggttctgatcggtcttccatcattctcccactgtcaggattaaagcagttccacgaaatagtgggtcattttgtggagataacaaaggatcgcattgaaggaatgatgggtgcaaatcttcgaacggtggatccgccacaaaggtgaatggcaggcagtggaagatggtaaaaataattgtcaagtttggtttaaagcctctaattgtagagatgcaattgtggtgtcattcaaggtttggaataatccgatttttgtctgtttgattaacagagaaatattggagataagttgtgaagggaaataatggacaaattggttgtaatttgtgagtttgatggtgtggcctttcaataatgtctacttctgtttagtatcaaacactgcttgaatgtactaatattaattaattaattaattaattaattactt

SEQ ID NO: 15770 - DNA, 527 bp, Gossypium hirsutum
  Clone ID: LIB3829-030-Q6-N6-A10
ctaaaagtcatgggaaaaacattcaatcccattacatatatccatacacaacatgttttttttagtttatttatacaacaatgctacagttgcagctacagctaccgcatggctgcgatcaaacactccctccggccataagtcaaacttctagtagccatatgtagttttcttcatcatcctcatgaactcttcaatacttacctccccgtcatgatctcggtctgcttcttcaatcatgtcctgaatatctttttcggagaagtgttcaccaagctcctttgcaatgcgtttaacgtcgtcagcagatatctttccattgttatcttgatcaatgatttggaatgctttcataagctcttctttagtgtccctctccccgatcttggcagtcatcatgtgaacaaattcatcaaagtcaatggcaccactgccatccttgtcaacatccgcaatcatttgattgatttgcccttctgtcatttcgaaaccaagagccctcatagcaacattcagctctttggcat

SEQ ID NO: 15771 - DNA, 397 bp, Gossypium hirsutum
  Clone ID: LIB3829-030-Q6-N6-A11
aaggggaaatattgaaacttggaaaaaaataatatttgcccccaaaaaaggttaataaaatcatcataaaaaggattggtgttcaaacaaaacccttaaaacttcaacataaaaaaaaagtttttaaatagggggggggccccttttcctttgaaaatttggggaatggccccatttgttttttggaaactcccagggtttaacttgttttgggattcaaaaaatcctttttttttccaaaaagctccttccttttcactgaaatcggggcattaaggggaaagggggggattccttggcgtttttggcccaaagttttccttgtttttttgttgaacaaaaggaaaaaaaaggcaggtttttagggtttataaggaacgaaaaccgggggcttttt

SEQ ID NO: 15772 - DNA, 561 bp, Gossypium hirsutum
  unsure (1)..(561): unsure at all n locations; Clone ID: LIB3829-030-Q6-N6-A12
gaatgtaaacgatacaaagcttgcttacatatttttccatccttcataatcatacagaagactgactaatcaagcaatgcaagtaaaaacaagcttagtttaaagattcaacacaaaaaatttacattgaaattggatagaagcctttgtgaatattaccgatcacctcggngaaaaacaaagaccggagcctaaaaaacttggagacttcgattacgacacatacccttgcattgcgaagaaaacaccaaccatatcggtaaacaaaatgtcaagcagtccggtgatcgttgcatcatgcacaagtgagttggatcgtttcaccattcagttcgtgcacgattggaatgaagaaatatcactttattttcttgaggagagttgaggtcctgaactcggcatcatcctggacaaagctccagcagaagtaagtaagagggatactgacagcatgccacagagcgtgtgcatctacaaaccctttataaggtgggaaagtctaatatttccaagaacacaacaaggcttccccacacaacaaacagccaaaccttccagcgt

SEQ ID NO: 15773 - DNA, 559 bp, Gossypium hirsutum
  Clone ID: LIB3829-030-Q6-N6-A7
agcactacaaaagtaaaaatcttgacatattaaacctgccttgattagcactacaaaagcaaagagaactgaaatacatttatataaagcagtctccaaaattcatatctgctatttttgtgcagatcattaaggattgttctcagccaggggatgacatttttgatttttggtgcgaatgtacaaactacaagtctgttatgacttgtgcacttaagctgttccttacaagatcatagtctgcacccagaaaccagattatcttaccgaagaaggttggattcgtttcaaccgacggacaacttgcctcatagttggtcttgctgagaggctatcaactgtgcatgtaatggccaagtgcagcagttctacaagatggtcatgcggaccgctatcccataaccttgcagtgaacacatcctttgcttgaccctgtcgcagcatcatgcaggcccaagagacgatattgaaaccatttgcatgcgaggagaaagaagatccaaagcttttttatctgatatcaactcgagaagcacaaccccatagctgtagacatcag

SEQ ID NO: 15774 - DNA, 594 bp, Gossypium hirsutum
  Clone ID: LIB3829-030-Q6-N6-A8
tttttttcttttttttatttttttctttttttttttcttttttttttttttttttttttttttttttttttttttttttataaattttttaaattaataatttttttttttaaaaaaaaaaaaaaatgggaaaaaaaaaaaaaaaaaaggaggaaagaaaaaaagtgggaaaaagggggggaaaaaaaaaagaaaaaaaggggggaaaaaaaaaaaaaaaaaaaaaaaaaaggggagaaaaaaaaaagggggggggggaaaaaaaaagccccaaaaaaaaaaaaaaaaaagggggggcgaaaaaaaaaaaaaatgggggggggggggtggaaaaaaaaaaaagggaaaaaatagaggcgcgggggaaaaaccgccccaaaaaaaggggaaaggggggggaaaaaaaaaaacccctggggggaaaaaggggaaaaaaaaaaaaaaagggggttgggggggggacaaaaaaaaaaaaaaagggaggcgggggggaacggggagaacccgaggggggccccggggggggggacccggggccctaaaaggggggtttcaaaaaaaggcggggggaaaaaaagaaaaaaaaggaaggag

SEQ ID NO: 15775 - DNA, 509 bp, Gossypium hirsutum
  Clone ID: LIB3829-030-Q6-N6-B12
gaatcattgaagggagttcagcttcatcatcatcatcatataaagaaaaaacagaagtgaaggccaaagctgacattgcattgtagaagcaacaaatgaggcataaatttaggcacccaacattgatccaaagttcttcctgcactctgacaacatatccatgtaaaactgacacttgctgatttcgttcccatagctattcaggcagtcttggaatgccttaaagtgtatgctgcatgcatcaaagccggtaaaactattggcaggggctgctgcagcctcggaaacaacagtttcatgttgaatagtccgaggacccataacagcatcgacagccctgtgggctacagcacttccagttccaaaagccatagccctgagctattgttgagcctatgcctccaagaagggatcccccacttccactctgaacaggagctcggggaggagcatgttgagcaagttgaggcggggggctacatgccggaacagacaaggggctgggcgaa

SEQ ID NO: 15776 - DNA, 367 bp, Gossypium hirsutum
  Clone ID: LIB3829-030-Q6-N6-B9
aagaaaaaaaccaaatcagctctcattattcaaataaaacaggtaaagaggagccaaggagtggagacagacgccacaaccaagggtttaaccccccaacgaaatatagcattcatcagagtacagaaagaaataggttatagggacaaataaaaatactagtttcagttggacagattatcctgggtcttcctgaacagcttatgctcgatatgctgagcaaaggtacgaggagggaacagggggaggttgggtctaagagacagtgtcggggagggggttagggatgatcttatccttcgggggctaacaaaaaactgcccatgaaatcctaaccttttccttattaaccaaacccctggggaaa

SEQ ID NO: 15777 - DNA, 563 bp, Gossypium hirsutum
  Clone ID: LIB3829-030-Q6-N6-C10
aatctcttatttgtgcaattttcacagtttctacaacttctaaattttttttgaaggttttccattttccccgtatgtacatcaatgggggtggggagtgagctaaaaagattaaaaaaagaatttaggaatcaaaaccgcagaacatcagcagtgagcagccgcgtggagatgtccgattcccccaatgtacaatatacaaaagccatctctcctcagcagtcaatgaaaaagatatatatatagagagagagagaccatgaactcctctgtgatccagtcatcaaaattgggattcaacggcttattggctgtcatctcttgtgccagcattcctttctttggcacggaaatcttccaagccccggtattcttccccgagtaacctatccaattcaggatgtttttttaagggctctccctggtctcggaagtgatggaaagcccagtatttttcaaggccataaagattgcctttatgatagaaatcaagggtaagttgctcaaaatccttataaagatcatctcgatatttcttctccaaaccatagctataaaatctg

SEQ ID NO: 15778 - DNA, 489 bp, Gossypium hirsutum
  Clone ID: LIB3829-030-Q6-N6-C11
agaccaaaatttactatcacaagttctttattccatagaacaggtccttttcgtccgtgtgtcccaaactacaactatctaatgaagaaacttcagaaaaggaaaaggaataggaaaaactacaattatctgatgttttttttttctccactttaaacactctcctggttacaaaatacaatttagctcatgtcaacaagagagcaagaattactgcataaactataacagcagacagacaggtcaaaattgctccaaattgataatggatttacttcatatcctgaatgggcggttttctgatttagaatggtctaacttagccttcttaaaccgtgttttcttgggggcgatttgttggaaaagatttgcaccgccgaacttgggcttattttgccttatcttcttcctcttacccctgtcatattcttcatcccattcatctggaacataaccaattcctttactttccgaatcatttgcttctat

SEQ ID NO: 15779 - DNA, 560 bp, Gossypium hirsutum
  Clone ID: LIB3829-030-Q6-N6-C12
ccattaacgatgcttggattccagattcagttgattttaaaatttcatcagagttaacttctatgagcgtgtcaaaagtaagtgagctaattgacagtaatgaaagaagatggaaaaaagagctgattatgagtaccttcgcagaagttgatgcagcacgaattctctgaattcctctagcacggacacctcatgaagattttcttatttggggaggcgagccgtcgggtgatttcacagtccgaagtgcttataaactattacagagaatggttgaaaatcctagagcttatgctttacaaaccatctataaaaaattttataaacaactctggagtctaaatctaccatctaaagtaaaggttactatatggagactgttatggaactatctgcctacgaaggtaaatttacaacacaggaaactagctgccaatacaagttgtccccgatgtggccaaagagctgaaaaaatgaatcatgtctttcgggaatgtcctgtcacagttgatatatggagagcattatcatttcagaatattttgacgaatcaatgtgag

SEQ ID NO: 15780 - DNA, 584 bp, Gossypium hirsutum
  Clone ID: LIB3829-030-Q6-N6-C8
aaacaacaaaaagttcaaatcacttcattatttttagtaggttataatcaaaacaccaagataaccaggatcctatggcatccacatacatatatatacaggtattcaaagttactttgttttgttgttcccactctaagagcagcgggtaactaacactgattgcaagcagtgaaaagtgaaaaaaaaaatcacatttcagcaaacagtttctctgccttaccaccttcagctagtgaacccttggtccatcttttcagcatttctaaggctgccttgggctggtccataggcaccatgtgaccagcatcatgaaccttaagaaaaccaagaggtccatgagttttcaagactcctgcttccgagccatcaaccacaaatggaacctctggcgatgctacaaattcttttcgaccagaccattgcattgcatgaacccatcttgaattgccgagccagttgcagataagatcatattcaccagcatagacaagaagcttgattccgtcctcaaggagagcaggaatgccaacttcaagattccgcatccagtcaaccagcatgggctgatacactgtagggct

SEQ ID NO: 15781 - DNA, 439 bp, Gossypium hirsutum
  Clone ID: LIB3829-030-Q6-N6-D11
aaagtagaattgaaactaaaagatgcatcaattgatacgcacacatcacatcaagcttgaatttcagataacgcaagcggcagaagtaggaaaaatgagcagtgataaggcaggggatgtgcttaggaaacataagcagttggtgcgaggcgtggacgaaccatggcagaaagaggcacggtcttttgcaaagcaagcccaaaggactcatccatgtttaattccccagtaccgggaggaagcatccagtcgaaagagtgcaacaaagtgcctaagatgtactcaaccagcacgatccccatcctggttccagcacagattcttcgcccaccaccccatgggatcaactcaaagtcggtccctcttggggtcgattttgggaaatctcccacttcagaaaccttttcaggggggaaaatccagggggtttgccccccca

SEQ ID NO: 15782 - DNA, 452 bp, Gossypium hirsutum
  Clone ID: LIB3829-030-Q6-N6-D12
gataatataaaaccttgaaataattgttttaagaaataacatcaattggcaaacagatttatattaaaaaaaataaaactaagaaaagagagaactaaatgtatgtaatgtttatttgactacatctcaagggccatctacctctaatcagtaatcaaatgtaatgtctcttcattggctgatttcctcaaccgatccgcagctttttcaacctccaagtcccagtttgttctggcagtgagaatgattagagttattgtttgtagaagaaccccaactaccatcccccaccatataccttttactcctaaacctaatttgaatccaagaacacatccaattggaagaccaataatgtaatatgtagtgagggtgacatatgctactatatgttggcatccactcccaatgggcactccctgaaaaaaagggctggattccatttcaagaaa

SEQ ID NO: 15783 - DNA, 417 bp, Gossypium hirsutum
  Clone ID: LIB3829-030-Q6-N6-D7
aaccacaagatggataatacatatatattatattcttacaaatatcatttcaagaatttgttttacaacattttcctgggaaaaaaataatacctgtatccgttccacttttgtacaaactcccaagttaatacaaacagtgattggcaacatgattgaaataagctgagatggtaaactaatacatacattacatacatacatacatacatatggagaaaaatccgaattttcagaatacaattttaaccttcccttttaccagggaaaaagatggagaaatgaaatccaggccatatttttattcatcctcaccttcggtgttaatagatttttacggaccgggtagtattcttcccatgctctgggggaaaagcataagaaggatttaaggggggaatttcaacaccacgggct

SEQ ID NO: 15784 - DNA, 383 bp, Gossypium hirsutum
  Clone ID: LIB3829-030-Q6-N6-D8
ccacagaaaaacaaaaaaccctcaaaaaagagagataaagaaatggttttacagttacagattttattatcgtcgtatataggcaattaagcatctcgaaaaatcctgagccaagcagacagatctttaaaaaccctagcaagaccgatcatcaatctaaagaaaagcccctaagagagagaaagagagaaatggggatccttaaactcaagcctccgccttcacggacgacgatgaaacctcctcaccattcgctgtttccgggggtgacggagcatcgggggcagcggcagtagcagcgcgagatttgacagtatcgagcatacgcttgctgatctccttggaatacatctgaaggatctcgaggccatcatcgtcggggg

SEQ ID NO: 15785 - DNA, 361 bp, Gossypium hirsutum
  Clone ID: LIB3829-030-Q6-N6-D9
aaacagagaccataaacatctcttattcctctttacacaatatgagccactgggaaacataatttgaaaattttcgggggggaggggggcgggggaagttttgtggatgaaagaaaaccctaagattaagatacaatcatgcttcacggttagggagcctcttattcaatcccaactatcattacatacaagggtaaattcccttccctgcaatgaggggcttaggggggggcaatgacctaatttcaggggcagaactgggaaacagtatattcagcttgggcatgaggagggcacctcttggtggaatctcattcaaaaaaaaccgcggaacatcgggtttttgaaccactccataaca

SEQ ID NO: 15786 - DNA, 578 bp, Gossypium hirsutum
  Clone ID: LIB3829-030-Q6-N6-E10
gaaaaaaaaactcatgatattacagtggcattaacaaagtctatttcagttctttctcgcagattacagaataaatttacacatgttttactgagatcaagaaaggagcagaaagggatttggcaatggagcttttagccggggggatagttccatggaacaaatataggcactttcatctaatggaacttgaggttagtcaagacattgttgttgaaagggtcagccaagtgatccaacaggttctggtatggtcctacacctgtcacgagcccttgtatgaagtaacccaagattgccaacattgccaatctcccattcttcacttctttcagcttcaaatccttcaatgacttctcatctttcccaaaaccaagtgggttaaacagtggtcctccagggtatgccggctcaccagaccctccaaggtacttcaggaaccccaagaaatattgtttccccatcgaacctggtttggcccagtcttggaaccttctgtgctctgcaaatcccatgagtgccatctcgaacacaaacaaagtgtaagggtctgcccaatagctgtatgttcctgctgg

SEQ ID NO: 15787 - DNA, 558 bp, Gossypium hirsutum
  unsure (1)..(558): unsure at all n locations; Clone ID: LIB3829-030-Q6-N6-E12
ggaggaaaaaanaagtaaaataattaatttccaaaagcaatgtttatagttccaaatacattgtgattggtgcaaaatgaaagtagttttgtttaagaggttaagtattattatttcttgcttaattccaaaacctgatacaaaggtttagtagtagaacaaaaagttagccaagattgaccttaaaagtgaacactatatccttctcaaagctaaaataaaatggtttcagtgtaagggtttctgcttctaactcattcaaccttcttgctggatttgtcatcactaccgtctgaagacgtaaccgcagtcttcaactcgtcaaactccaataacggtttgacatctccattccatacacagtgagcagccaagaatccaataactgccggtacaatatacaaaagtgcaggctgtgcagcttgaaaccagttcatgacaacaattgtaaggaccaatcctactgtgtatcccaaaaatgcactcttaaaatattggctccctttccctctagatacatcaaatcttaatgctagggctacaaaaatgccaggaatt

SEQ ID NO: 15788 - DNA, 529 bp, Gossypium hirsutum
  Clone ID: LIB3829-030-Q6-N6-E9
gaaaccaaagtcagttgccaatgctcctctcttataaaaaccagaagctctacttctccccaggcatcaaatcaggttcgcatatatccccacgacaaagagggcagaccctgggaatctccttgagccacttggctatacatgttctatgaaattcatgattacaaggcaatctccgaatgctatccccctcctcatactccacaagacatatgtaacattgcacagcctcatcattcttaagtttaggggacttggacactttcacaggaagggattccacaacttcgttaggggcaggaacagaaccaattggaaacacggacggtcgcgaaaataaaaccatagactgctggggaatttcatccaggacctcaaataaagcctcagctaacataacgattctggatacactagacctagcaccaggggggtcatcatttgaactaaaatctcgattatttacacgacatgtgcatcgaccacttttatgttggccagataaaatgcaggatctttcatgccctga

SEQ ID NO: 15789 - DNA, 502 bp, Gossypium hirsutum
  Clone ID: LIB3829-030-Q6-N6-F10
acagtatgcaagttcgagttacataaaacttgaaaagaaactaaacaaagagatacaatagatgaacatgagaaatgtaagagatgcattttagttacaaacctgttttgtttttatagggtatttccctttttctaaatcagttgaacattcatcgaatgctaaccaaaaacaaacaaagattaccattacaacacacccatatataaatattcaaagtcaccttaaatacatcacacacaagcctaatcagttaaaaccaaagctaaaggggcttctctttccttatatgatcagggtatggaatctatgttcttactcaggtcctccagcttcttcatccttaacttttccctttcactcaccagctccattaactttgggattaggtggactttttccttggtcttttcattaaaagcatcaaggggcttcctttggactcccttttctttttttggcaaggggtcccctaagggttcaattctttggtaaatggggg

SEQ ID NO: 15790 - DNA, 443 bp, Gossypium hirsutum
  Clone ID: LIB3829-030-Q6-N6-F12
ggaagcaacaaaactttgacagagttcattaagaagatatggtaaacaccgtgaaaaatattcatccttttaaacaaaactgtttctaaaaggccaaaagaaatcatatcaggatccttcaaaacaaaccaaaaatactgaattaacaaataaagccaacgtctaattcattctccgaattagctcattgatgtaattctcacgattgccagcgtctcctccttcaacatagtggtttctcttcttcttcagacctcccaaaggtgccttgagcttgaagggccagaggaaattgttggcctccttaaaatgaggtcccacagtcatgatctcatggatgagatcttccacacagatgatgccaaacttgcccagagcctgctccacgattgcattgtctgtcaaagcagttctctgtttgttcaacttcccaaaacctcttt

SEQ ID NO: 15791 - DNA, 141 bp, Gossypium hirsutum
  Clone ID: LIB3829-030-Q6-N6-F7
ttttttttttttttttttttttttttttttttttttttttttttttttttttttttttttttttttttttttttattttattttttttttttttttttgtttttttttttatttttttttttttttttttttttttgcttt

SEQ ID NO: 15792 - DNA, 453 bp, Gossypium hirsutum
  Clone ID: LIB3829-030-Q6-N6-F8
gcaaactaatccttggatatattccactttaaattcctcaaaacacatgcacacaaacaaaaacattgataaatgtacaaaaatattagaaaggattctcaccaggtagataagaaggagatccaccctcgatttggttctttttacgattgaatataccgctgatattaggtaaaaggacttttttcgagatggaagacctctctttttccaacttatgtacctgaattttctctggtgggttcggcttttgaagtctatagtgttgtggggatgattcagttgacatttgtgcttctgctaggatcctggatgcagcttcagctgcttttttctgttccctttcacgccacctacggagctccccttccaccggtctctttgctggttcagccatctcagccctcttcaaagcattggcagttgcaaccttcatgtcttcaatctcttttt

SEQ ID NO: 15793 - DNA, 361 bp, Gossypium hirsutum
  Clone ID: LIB3829-030-Q6-N6-F9
agaggatgaggatagtgtggtgtccaccatattaaaatggcatataattcctggttgtaggccacagcttatatacatttgagcaggcaactagctaaggcaaaacaagtgctcgatattatgtcacacaggaagaaccgtgacataaagatacaaagaaagtgatggtcacttgaaactagaaacactggaacacacccagatcaaccagactgtccccatggacagcttctaacgcacgacaattgctgcccatgttttgtgccatgggggcctcaacaagagataattttgcatgatgaaaaaggacttaacaccatttgggtgccaaactagcataacctcaaacgggggttaaccc

SEQ ID NO: 15794 - DNA, 436 bp, Gossypium hirsutum
  Clone ID: LIB3829-030-Q6-N6-G10
gtgaatgaacgtgttccttttccaaattaaaaaagttaaaaactgaggtagaaaacctaaccaatctctttctgataatacagtaacaaaatttgatccaagtcgatggtaacatttagctttccatcaacatggatacaaatagctactttaaataaccaatccttccctacgagtcactgccatgttcattaatcataaagtttttaactagagaccaagtagaactagcattacacctaataaaactatttgacattgaagaagtaccattagatccatcagccaaactgtgtcatccttaactcgatccagtggccaacactctacaagagctctttgcaagtggacttgttgtgccctaaacccttgcatctactgcactgtagttgacgcttcattacctctggtgttccaactttttttgtggtgggcc

SEQ ID NO: 15795 - DNA, 536 bp, Gossypium hirsutum
  Clone ID: LIB3829-030-Q6-N6-G9
atcctcaattcagttattatacccaagcattttagttaaatatccatagtaactagtagcatatctatccatggaagcgcaaaaagaaaacactatattttatcaaaaacacatttcacaacagaattgatcttcaaacaaaaaggctggtttaggttgcattacttggggaaaaaaatctcctctaatccatgctgaaggttcttgcgttagaatttggagccctatttgacaaagcatcattactattccttcacattaccagaagattctgggggtggcttcacaatacttagttggcctccatccttgttagcaacggtggccgcttttatctcattgcagtgatttatgaacttggtcaactctcgatcagcgtccatctcttttgtcatcttcgatggtttgaccactctcttacctttgcgaatgtgaggaacttttccatggcgattgggagggattgttttctgctttttttgccccttgaagagatttcctttctgcgtcatctttctccctctcaacctctcttg

SEQ ID NO: 15796 - DNA, 403 bp, Gossypium hirsutum
  Clone ID: LIB3829-030-Q6-N6-H12
ttttttttcagatttgaaataaaaaattatatagattagaaaaacttgggctggtttccagcgcagacataaaaagaacaaacgtcacaagcaaatatgaaatccaaatccagaataaacgcctatttacatatctctaactgccatgcattacttctttacatgactcaacaatttacagtttaatggattcgaatttctcacccattacaccgcctttttgtttttggaactgaatgtaacgcaaggggctggcaaggaaagcatccgccacactatcagggtttggggaatcactttgcatctcagtattaattaattctatcaacccttggattggggaactggggatttggttatttcctttttcaaagaaaaaaaagtacttgttcaatatcttaac

SEQ ID NO: 15797 - DNA, 429 bp, Gossypium hirsutum
  Clone ID: LIB3829-030-Q6-N6-H7
gcttccaatttttggcaagcttcattgcaaagaaagaaaatagcagagttttgtgatttgctcattagctgaagcaggtggctacaaaataacaaattgattgatcaattaaaggaagctttgcggctacttgtttggaaaacattgagctgaaacagctcagtctttaacatcagctacacctcctggagaaatctgaaatcgagcttcagcctcggccaagcaaggtgagcttattattttacaaatacgttcctctcctcttcccttccgaacagccagtcttgttgtggaagcatgagccatgatgttaccgccaataggcttaatttgaggaccggcaaagattgctgaaccatccacttgagcaactacttggttcgtaattacaacgggcacgccaaactcatctgccaatttctgaaggct

SEQ ID NO: 15798 - DNA, 440 bp, Gossypium hirsutum
  Clone ID: LIB3829-030-Q6-N6-H8
aagtaattaattaattaattaattaattaatattagtacattcaagcagtgtttgatactaaacagaagtagacattattgaaaggccacaccatcaaactcacaaattacaaccaatttgtccattatttcccttcacaacttatctccaatatttctctgttaatcaaacagacaaaaatcggattattccaaaccttgaatgacaccacaattgcatctctacaattagaggctttaaaccaaacttgacaattatttttaccatcttccactgcctgccattcacctttgtggcggatccaccgttcgaagatttgcacccatcattccttcaatgcgatcctttgttatctccacaaaatgacccactatttcgtggaactgctttaatcctgacagtgggagaatgatggaaagaccgatcaaaacctgcaact

SEQ ID NO: 15799 - DNA, 413 bp, Gossypium hirsutum
  Clone ID: LIB3829-030-Q6-N6-H9
ggtaacaactaacagataattaacaataaccgcagaacacatacacgggggctacaagttttattataccagtcagcactaaaatcacaacacggtatcacagctgacggaaaagcaataccaacacaacactgcagctctgcagactatgacacaagcacaaaaacaagttttattgttactaccaaagccagtaacaccaaactagacaagttattattgcttaagaacaaagtaaagatcccctaagtagtgaggataggtggcagataatcagatttggcaccaagaacacgagcctttgtgtcagggaagaactcgatgccaggcaattcagtgacagatccctcactagaaacaccgatggggtagcggagtaggtgtccaggcaaggctcgctcaagggactcact

SEQ ID NO: 15800 - DNA, 588 bp, Gossypium hirsutum
  Clone ID: LIB3829-031-Q6-K6-A10
acccccatacatctattctgttaactcccagtctaatccctagttttattgcatgtaatcctgcatatgcctctgctataaatggatttgctacgtttgaatgagtaactgcttctgttgcaagtagtaccccttcctcgttccatgctattaaacccgatgccgatctgaaatcctgactgttgaaggttacatcaaaatgaataatggtcctaccgcttctagacacctgttgagaaaactcatgagacaaaagagtttctactgaaccatatgaaccagaggctacaacagaagagtcgaagttgttcatcagttcctctagcaaagacccatgcatttttggaagatatggtagctattctcttcatcacatccgcatctaggacactgggaattcctaacaacccttttgattttgaggttgctaaaagttgggataaagttccaagagatcctccatactgtcatttgaatttttgagggaatatgtaatttccataatttagtatagaaattttttcctcggtatgtaacattaatccattaggatcaaggttagtctgctgtaatagtttataagcactc

SEQ ID NO: 15801 - DNA, 575 bp, Gossypium hirsutum
  unsure (1)..(575): unsure at all n locations; Clone ID: LIB3829-031-Q6-K6-A11
tgagttagaattactcctatgcgtactgagnacatcatcagagctactcgtactcaaaatgttcttggtgagaagggtagaaggattagagagttgacttctgttgttcagaaacgattcaagtttccagagaacagtgtggaactctatgctgagaaagttaacaacaggggtctttgcgccattgcacaggccgaatccctgcgatacaagctccttggaggccttgctgttcggagggcttgctatggtgttctcagatttgtcatggagagtggagccaagggatgcgaggtcatagtgagtggaaaactccgagctcagcgtgcaaagtcgatgaagttcaaggatgggtacatgatatcctctggtcatcccgtcaaggaatatattgattctgctgttagacatgtccttcttaggcagggtgtgctgggtatcaaagttaaaatcatgctggattgggatccaaagggcaagcagggtccaatgaccccattgcctgatctcgtcaccatccaccctcccaaggaagaggaagagtatacagaaaagaaggactttgaaccgcttgc

SEQ ID NO: 15802 - DNA, 572 bp, Gossypium hirsutum
  unsure (1)..(572): unsure at all n locations; Clone ID: LIB3829-031-Q6-K6-A12
ctgnacagtcacaggataccttacttgttgttgagtggtccatgcatgctttgttagttatttcaattttaaccatcagcttcagatgttttcaaaatttgtttgtttttaacctcatttattgctattgatctgctcattcatgatggctctaacccttttctggtaaactgctcctgggccagttgtgggttggcctccaattcgttcttttaggaaaaatatagcaaacagccagttcatcgtaaactagcttctgaatcatcaccaagtgtgctccctcacaaggttggtaatgaaaaaaaagctgcatagcctactgcgaaatttgtgaaaatcaacatggatggagttcccataggcaaggaaagtcgatctcaaagcctatgacagctatgaaaaactctcgacagctgttgatgaactcttcagaggcctccttgctgctcaaataattcctccgctggtggaatagtgaataagcaggaggaggagaaagcgatcacgggcttattagatggaagtggggaatatacactgggttacgaggataacgaaggagacaggatgct

SEQ ID NO: 15803 - DNA, 297 bp, Gossypium hirsutum
  unsure (1)..(297): unsure at all n locations; Clone ID: LIB3829-031-Q6-K6-A7
gnaanactaaagcagcattattcagaatgcaggctatggaggaacatgtctatagaacattacaagtgaggatctgcaacaacatcaagttcctatcaataaagctctgctcattcatcaaatcaaaaatctcacaaatggagcatgttatgatataactatgatttttctcttcttgtacactattagatggttgaaaaaaaaagggaattttgttcatatttttaatggaacaagaatgtattttagaggaaaatgtgtgcagaaattagtggtctattaatttctttttgctct

SEQ ID NO: 15804 - DNA, 463 bp, Gossypium hirsutum
  Clone ID: LIB3829-031-Q6-K6-A8
ccgtgctttggtcgatggacccgagactgagaccacgacggcgaacaaacgtgtgccggcaaggatttcgtggtgctggtgtctcggcttttcgtagtggaactgttcagacgttacgattcgttcgagatcgaagttggtaagtcgccattgggagctgcagttacagtaacctcattgaagagggcaagcttttagggttaaattaaatttctggatttgttaagggtaaatttggccccaaaaaaagaatccgtttatgcgcatatttttggatatattgcaagagaagtggatttaatatacgtggagatttgaataataacgatgacctaactacttcatctaaattttataaactttcattctagagattgaaaataaaaaattgtaatttaagcactgttattatatatttttatcattttaatcagtgttattatatacttttattattttaatc

SEQ ID NO: 15805 - DNA, 557 bp, Gossypium hirsutum
  unsure (1)..(557): unsure at all n locations; Clone ID: LIB3829-031-Q6-K6-A9
agtggncagcctttacctgaaaatttgaacctcctgctgttgaaccttggacaactggaatttttggctgtgctgaagatcagaagttgctggacgggactattttgtccatgtgttctatttgggcgtaatattgagagcttgagagatgatacgccctggactacaccatgcatttgtcatgctatttgtgttgaaggtggcattgcattggcagttgcaacagcttttgtccatggtattgagccgaagacaacatttctcatttacgagggtttgttgtttgcttggtggatgtgtggaatatatactggcctttctcggcaatccttacagaaaaagtatcatctcaagaattcaccctgtgatccttgcatggtgcattgctgcatgcactggtgtgctttatgccaggagcatagagagatgaagggacggctatcagatgactttgtcatgccaatgactgttgtcaaccctcctcctgttcaagagatgaccgccaataatgaaaaccaggattccacaccaccaccctctgggactagcacaaactt

SEQ ID NO: 15806 - DNA, 603 bp, Gossypium hirsutum
  unsure (1)..(603): unsure at all n locations; Clone ID: LIB3829-031-Q6-K6-B10
gtttgggggtattgcaaagnaaatatttttattggggaaaaaaaaatggggagaggtagggttgagttgaagagaattgagaacaagattaacaggcaagtaacttttgctaagagaaggaatgggcttttgaagaaagcctatgagctttccgttctttgtgatgcagaggttgctctcatcatcttctccaataggggaaaactgtacgagttttgcagtagttcaagcatgatgaaaacattggagaggtaccagaagtgcagccatggagcaccagagacaaatgtttcaactagggaggctctggagctaagcagccagcaggaatatctgaagcttaaagcacgttatgaagccttacaaaggtcccaaaggaatttacttggagaagatctggggcctttgagcagcaaagagcttgagtcacttgagaggcagcttgattcttcattaaagctgataagatcaacgcggacccaatacatgcttgatcagctcactgatctgcaacgaaaggaacatctacttaatgaagctaataagaacctaaaacaaaggttgatggaagggtaccaagtacattcactccagctgaatcca

SEQ ID NO: 15807 - DNA, 576 bp, Gossypium hirsutum
  unsure (1)..(576): unsure at all n locations; Clone ID: LIB3829-031-Q6-K6-B11
gngttctgcaaacaaaaagtcttgttctgctggcagagaggtttatcagaaaagtctnatgtacctgaaaagaaattccattcttttaagaaggtttcccggtccatgggttatggtgagaaggatatagccttagtatcttttcagtcagtctccaaaggtaaaattctgttttgtcttacttctattatcgcagttacagaaggtaagagagcatatgcaaaatttggacttttgagataatgaatatacaattttttactgccttcaggttactacggagagtgtggaaaaaggggaggttatatggaggtaactgggtttggagttgatgtcagggagcaaatatacaaagtggcatctgtgaatctgtgttccaacatctcgggtcaaattcttgccagtcttgtcatgagtccaccaaaggttggagatgaatcctatgaatcatacagtgctgaaagagatggaatcctctcatctttagccaggcgtgcaaagacactggaagatgcattcaacaaattggaaggtgtaacatgcaacaaggcagaaggtgcaatgtatctgttcccc

SEQ ID NO: 15808 - DNA, 592 bp, Gossypium hirsutum
  Clone ID: LIB3829-031-Q6-K6-B7
tgccaaaccgtcacggctcctctcgatcgaattaagcttcttatgcagacgcatggggtgagagctgggcaagagagtgcaaaaaagctattggtttcattgaggcgattgcattgattgggaaggaagaagggattaaagggtactggaaaggcaaccttcctcaggtgataagaatcataccttacagtgctgtccaactctttgcatatgaaacttacaagaaacttttcaagggaaaagacggcgagttatccgttgttggaagacttgctgctggagcttgtgctggcatgacatctacttttataacatatccgttagatgtcctcagactacgcttagctgtggaaccagggtaccggaaaatgtctgaggttgctttgaacatgttgcgagaggaaggttttgcatccttttattatggtcttggaccttctctcattggcatagctccatatattgctgtgaacttttgcatatttgacctcgtgaagagggctttgccagaaaaatatcgtcagaagactcaagcatctctactaacagctgtagtgtcagctcttgctgctactgtcacttgctatccttt

SEQ ID NO: 15809 - DNA, 580 bp, Gossypium hirsutum
  unsure (1)..(580): unsure at all n locations; Clone ID: LIB3829-031-Q6-K6-B8
gnaatagtggatctttgccttgntaggatcaggaagctagcagataactgtactggacttcaaggtttttggtgtttcatgctgttggtggtggaactggatctggtcttggatcattgcttcttgaaaggctttcagtggattatggaaagaaatcaaaactgggtttcactgtttacccttccccacaggtttccacatctgttgtagagccttacaatagtgtattgtcaactcattctctgttagagcacactgatgtcgcagttctcctcgataatgaagctatctacgatatttgccgaagatctcttgatattgagaggcctgcttacactaatctcaacaggctggtctctcaggttatttcttccttgactgcatctttgagatttgatggtgctttgaatgtggatgtgaatgagtttcagaccaatttagtcccataccctagaatccatttcatgttgtcttcatatgcaccagtgatttcagcggaaaaggcttaccatgagcagctatcagtagcagaaatcacaagcagtgcatttgaaccagcttcgatgatggccaaatgtga

SEQ ID NO: 15810 - DNA, 576 bp, Gossypium hirsutum
  unsure (1)..(576): unsure at all n locations; Clone ID: LIB3829-031-Q6-K6-B9
cccacgcccgtccgggcccctnacaactttanaattctttctttaacaaaaaactaggcatctatctatctgtcatggaagggatatcgacattgagaatgatgctcattataataacccgcttacttcttgttccgtcatctctaccactaccaccgtggccacctccatctcattctccgtttcgggtcctaaacaaaacaagaaaacttcaaaaaacagtgtagctattaaaggttcaaagaaagctgtaggagacttggaaaggaagcaaccggtataccgtggtgtacgaatgcggagttggggcaaatgggtgtccgaaatccgacaaccaaaaaagaaatcgagaatatggctcgggacttaccccaccgcagaaatggcagctcgagcccacgatgtagccgcactagccatcaaaggctgctcggctcaccttaacttccccgaacttgcaaaaacacttccacgccccgctagtacatctcctaaggaaatccaagccgctgcttcccaagctgctgcttcaacatatctcgacacatcgcggtggagcaacaacattgaacccga

SEQ ID NO: 15811 - DNA, 595 bp, Gossypium hirsutum
  Clone ID: LIB3829-031-Q6-K6-C10
gtcttggcctgtgcaaatcctagtggttcgcgctataatccgcgtctgtctgtgattgacaacatacacctgcctccaaccttgctgtccagatttgatttaatctacttgattctcgacaaggctgacgagcagacagataggcgtttagctaagcatattgtttctttacattttgaggacacagagattgctgagcatgatgtcatagatcttgctacattaacagcatatgtgagctatgctcgcaagaatattcacccaaaattatctgatgaagctgctgaagagctaacccgaggatatgttgaaatgaggaaaagaggaaatttcccaggcagcagtaaaaaggtcatcacagcaacaccaaggcaaattgagagtctgatacgccttagtgaagccttggctcgtattcgattctcggaaacagttgaaatgcgagatgtaactgaggcattccggcttttggaggttgctatgcagcaatcagcaactgatcactccacaggaactattgatatggatcttatcaccactggagtttctgcaagtgaaaggatgaggagggagagtgtgttatcagcaacacgca

SEQ ID NO: 15812 - DNA, 577 bp, Gossypium hirsutum
  unsure (1)..(577): unsure at all n locations; Clone ID: LIB3829-031-Q6-K6-C11
ccgcccacgccgtccgtggnatcaaaccatgactagnaaggtgccagttgattcgctgataggtaagacaattgggctttacttctcagcacaatggtgctttccatgtgctaagttcactcccaaactgatatccatctaccagnaaaatcaagcaaagtttggaaggaaaagtggtggtgttgaagatttcgaaatagtttttgtgtcgaatgatcgagaccaaagtagctttgactcctactacggtaccatgccatggctagcgttgccttttggagacccaattattagaacccttgcaaagtacttcgacgtgcaaggcattccatgtttgataatcataggtcccgacggaaaaacagttaccaagcaaggtagaaatctcataaatttgtaccaggaaaatgcataccctttcactgatgcaaaactggagtcgctggagaaagaaatggaggaagaagccaagagattacccagatctaattatcatgcaggtcaccgccatgagcttactttggtatcggaagggaatggaggggggccgtttatatgctgcgattgtgatgagcaa

SEQ ID NO: 15813 - DNA, 577 bp, Gossypium hirsutum
  Clone ID: LIB3829-031-Q6-K6-C12
gttccagttaaaaccccaaagcagagtcataagcaaaaatctcgtaagaagagtttccgaagcgtggggccgacagtcatctactctttcatgcaagtggcgggaataacaaacgaccatctcacaagttgtttcagattccaggagtgtataactgcagcagaagcaaaagaagaaaatgtaaccaaagatccgactgaaaagaaagaaactgttaatgtgatcaacacagaatcgtccgtagctatcgatgaattgagtttctcctccgaatgatgctgggtggtggtagatggcgttccacgttcgaccatcagtttaccacagtaattgattcaatacacatactcttgggtaataacgtaagtgccttttgcatataaaggtttgttaaatacttgctcataatgactttgccagattagagatttctggaaagtaaattaaaagttaaccggtgaaatgtgctgttgacgggggcctgcctgtttgtcataaaagtattaaattatgatgcaccattttctttttctctttgtatatttgaaaaagtttactaagtaaagatcatctttta

SEQ ID NO: 15814 - DNA, 575 bp, Gossypium hirsutum
  unsure (1)..(575): unsure at all n locations; Clone ID: LIB3829-031-Q6-K6-C9
gtgtcaaaaggttatgtccggtngaagctccgacgagatttttggtggatatttgtatttccacaaagcaccaaataaggatgaattccatcaagaacatgccggaagatcaaagcccttcacctgtatgattgcttgagagctaacaaagcaacgtctgcatggggattggaggctcgagttccattcttagacaaagaattcatcaatgtcgccatggctatagaccctgaatcaaagatgattaataaggatgaaggacgcattgagaaatgggttcttagaagagcctttgatgatgaaaaccatccctatttgccgaagcatatcttatacaggcagaaagaacaattcagtgatggcgttggctatagttggatcgatggtctcaaagctcatgctgttgcacatgtgaccgataagatgatgcttaatgcttcaaacatcttccctcacaacactccgaccacgaaagaagcatactattataggatgatcttcgaaaggttcttccctcagaactcagcacgattgaccgtcccgggaggagcaagtgtagcatgcagcacggccaa

SEQ ID NO: 15815 - DNA, 590 bp, Gossypium hirsutum
  Clone ID: LIB3829-031-Q6-K6-D10
ctggttcagaacctcagcgccaacatctgcaacacaatcttgaacttcaacttctaccttcatcaaccgctaactcgagggattcagatgaggagtacgctactcatttgaagctatcgatagggtccaacgacggtggcgaaaagaagcaagtaaaacgacattggaagctagtaggttgaaagagttcgcaagtgggcagctaaagttggccatggccgagaaggcctacgccgaaaaggctagacaagaagctaagagacagatcgagatggctgagcttgagttcgctagtgcaaagaggataaggcaacaagcgcaaggtgaactggagaaagctcaagccttgaaagatcaagccacaaagaagataagtgctacaatcatgcagatcacttgtcaaacttgcaagcatcagttccaaacatcaacagctgctggtccagatgatgagacctcacttgctatgagttacatgtcttcagccacaacagaaggggaaggagagtgacggcaagttgatcatgcaatgatgaatgatcaacccccattagcccttaaatctctttgttctttgatctgcacgttga

SEQ ID NO: 15816 - DNA, 590 bp, Gossypium hirsutum
  unsure (1)..(590): unsure at all n locations; Clone ID: LIB3829-031-Q6-K6-D11
ccaaaagtngaaaaatatattaccctcgatccaagtatcaaggcaatattgacggagcatatttcggtacaacatttccacatctgtttctgatgacatatgggcacttaaagcctcaaaagccaactcaaaactacatcccacgagttttcggcttcaagatccacaagccctgacatgattgatacatgagttgcagcaagccagaacttatacactcagatcaatttccggtcagtgagattcgtggtgattttcaattagcctggtgcttcttctatcaaagcagtgggttcccaacaatgcaaggtgaagtggggctccaaaagaaacaaagaaatggtacgattgattgattgattgatatggcaaatgaaatatggactgctagtggagcacaaggaatctctaggatttgtttttttatgaagtttaagtaagcatatatttttgtttggaagtgtgcgttttgccgtagttgataatagattaggtgaatatctctttcttttgttcaatggttttgttgacctagatacataaatattccatttctctaatgtaaacttcaacctcatcttttacatgaa

SEQ ID NO: 15817 - DNA, 598 bp, Gossypium hirsutum
  unsure (1)..(598): unsure at all n locations; Clone ID: LIB3829-031-Q6-K6-D7
ngaagnagcaaaaaaaacacacacacacacacacagattaagacagaagcatggccagccagatcgtaggaacaaagaagcttgtgtcgtgggtggcagcggattcgttgcgtcattgctggtcaagttgttgctcgagaagggttacgccgttaacactacagtcagggaccctgacaaccagaagaagatctctcaccttgtaacactacaagagttgggagacttgaaaatctttcaggcggatttaactgatgaagggagctttgatgcccctattgctggttgtgaccttgtcttccatgttgcgacacccgttaactttgcttctgaagatccagagaatgacatgatcaaaccagcgacccaaggagtggtgaacgttttgaaagcttgtgccaaagcaaaaacagttaaacgtgtcgtcttgacatcatctgccgcagctgtgtctatcaacacactgaatgggacagatctggtcatgacagagaaagactggaccgatatcgagttcttatcatcagcaaagccaccaacttgggggtaccctgcatccaagacgttggctgaaaaggcagcttgggaaatttgctga

SEQ ID NO: 15818 - DNA, 587 bp, Gossypium hirsutum
  unsure (1)..(587): unsure at all n locations; Clone ID: LIB3829-031-Q6-K6-D8
ctgatgagagcctcgnactgctttccaaacatttgtgaattttaagtctttggtccttgttagttgtgaaggcttcactactgatggtcttgccgctattgctgctaattgtaggtttcttagggagctggatttacaagaaaatgaagttgatgatcatagaggtcattggcttagttgctttcctgaaagctgtacctctctgatttccctgaattttgcctgccttagaggagaagtgaacttaggagctcttgaaagacttgtgtcaagatctcccaacctcaagagtttacgactaaaccgtgcggtcccgcttgataccctccaaaaactattgatgcgagctcctcaactggtggacttgggaatcgggtcttatgtacatgatccattctctgaggcctataacaaattgaaaattgccattcaaaggtgcaaatcaatcaggagtttatcggggtttttggaggttgctcctcattgcatgtcggctatttatccgatttgtggaaacctgaccttcttgaacttgagttatgctccaggccttcatggtaataagctgatgaagctgattcagcatt

SEQ ID NO: 15819 - DNA, 572 bp, Gossypium hirsutum
  Clone ID: LIB3829-031-Q6-K6-E10
gacttccacttacagtccagagtactcggttccgatttgcacctcttgatcctattcatgtcactgagcgacttaaacatgttatacaggctgaaaggcttgatgtacctgattgtggcttggcagcactagtacggcttagcaatggtgacatgagaaaggctttgaacattttgcagtcaacacacatggcttctcagaagattacagaagaagccgtgtatctctgtactggaaatccgttgcctaaagacatcgagcaaatatcttactggcttctgaatgaatcatttgcagagagtttcaaacgagtatctgaaacaaagaccaggaaaggattagccctgatcgatattgtaagggaagtgacaatgtttgtttttaagattaaaatgccctcagatgttcgagttcagttaattaatgacttggcagacatagagtatcgattgagttttgggtgcaatgataagttgcaactgggatctctcattgctattttcacaaaagctagatcttccctagttgcggcagtgaagtagctgtttcaaagcttggccttgtttcttctc

SEQ ID NO: 15820 - DNA, 574 bp, Gossypium hirsutum
  unsure (1)..(574): unsure at all n locations; Clone ID: LIB3829-031-Q6-K6-E11
ttgccactctttcctcccacccaaaccccacttgctttcaaaatcgccacttaaaaaccccgcntcctctccaaanacatcgtgaaatcctcgtcaccagttcctgggattgttgggttttcaatgatggcgtctgcaactgctggagaagatggtcatttcaagttgtctgaaactagtgtgcttaaaatcaacaagggtgatattactaagtggtttattgatggctcctctgatgctattgttaatccagcaaacccgagaatgctcggaggtggtggcgctgatggagccatacatagagctgctggcccagacacttaaagaagcatgctataaggtaccagaagttcaacctggtattcgttgtcccaccggagaagcaaggattaccccaggatttaaattgcctgcatctcatgtgattcacactgttggaccgatttatgattccgacaaggaccctaaaggctcactgagaaatgcatacaaaaattgcttaactgtggctaaagagaacaacattaaatacatcgcgtttccttccatatcttgcggtgtatacgggtaccct

SEQ ID NO: 15821 - DNA, 569 bp, Gossypium hirsutum
  unsure (1)..(569): unsure at all n locations; Clone ID: LIB3829-031-Q6-K6-E12
ggggcctatggntgttaaggccttggctgaggcattgaaggacaagctgaagaagatgttgagattgtgccacctaagaaagaaaagaggcaaaatgagggtggcgagaatggtggcggcggtngatggagggaaaaagaagaacaaaggtggcaatggcggtgccgaagatggtggacatggtggtggtggtggtggtaagatggaagggagcaagatggaatttatggttcaaccccaatttggatacatgcccgcttactcgggatatgagcacccgggctatgggttcggttacgggcacggctactccgggtacgtgccgggttacccagtatctgttcatcctcctcaccacatgttcaatgacgagaaccctaatgcttgtgccattatgtgaggagaaatggatttttaatagcgtagagttttatgttaaggaatgtgtaaataagaaacagagaagcagagagtttacttggaagtcaacattttgggttaaacttggatggcagtttataaaatgttaattttagggttttgatattgtaatttggtgttgccatttt

SEQ ID NO: 15822 - DNA, 502 bp, Gossypium hirsutum
  unsure (1)..(502): unsure at all n locations; Clone ID: LIB3829-031-Q6-K6-E8
cggncgcgtgggtacaactatttcgagagggtaatttggacattttctcaagtaggggacgttgcttggatgcccctctttgtgccatgaacttgacctccgatggttcgggtgagcaccatggatggtactgtaactatgtggaagttaccatgactggcgtccataaaccttgtagccagcagcagttcacggtggagcagtggttggcgctcgatgccccaccttatgatctcaccgccattagaaactattgtccctcggaggttcccgatgatcgtcgtcataggaagtctagctctagcatttgatgcgttttagttagaataataataattatcatggtgataatgaggatgattaataagaggggtaggtggggatgattatggactcatggtttgcaccggccctttggtcattagtgttcgtctctttttgttcgatgacgtttgtcgtgtaatgtgacaattatggattaaatatattatgttttcactac

SEQ ID NO: 15823 - DNA, 566 bp, Gossypium hirsutum
  unsure (1)..(566): unsure at all n locations; Clone ID: LIB3829-031-Q6-K6-E9
agcattggntttttccagggnaagtatcttgatctggatactggcatcattgtttccaatcagaagttgatgccattactcttcgatgcagttagagcctccctggccgagaaagctaagcctcagccttagaattgctatcttacctttaactctcttattgtttccctcataatccttgtgctttatccttatctccattgctaatatccttatctcctattttctccccaatgcatgtaggtaaagtacatgtacatttgattgcagctaagatcaaaattaggcatgattgaagcatgtcccaagaatctgtcctaaaaaatgtaaatgcaaatcaaaaccatgggaaattatcgccatagttggtcccaaaatcttccctatttaagatcccaattggtaaatggaagtgcttcaattttcgtcatctcaaatccccgttaataaagctgagctaaagagaatctcgtgctatgttactcaaaaagaaaacctttcatctctttacaattaaggctttctcaaagcaaggttttccaaaaattattctgtgaaataaacag

SEQ ID NO: 15824 - DNA, 592 bp, Gossypium hirsutum
  unsure (1)..(592): unsure at all n locations; Clone ID: LIB3829-031-Q6-K6-F10
tccgcggncgcgtgggtttgagtctcccacaacatccattttgttaaatcccacaaaaattcctaattttattgcttgtaatcttgcatgtgcctttgctgtgaacggggttgctatctcggagtgaatgaccgcctttaatgctagaatctccccttcctcgtttcgtacaagtaggcccgtagccgatctagaagattgactgtcaaaggctgtatcaaaatgaactgcgacttttgatcttcgacaaatctggcgaatggttctatcaacctgaaagattgaccagagaccacaacagaaatgtcggatctgttcgttagtaactagacggaagacctaggacattattgaaagacatggctactatccttttcatgttgaagacagtggggcactgatcattcaacacaactctcttgtgtctgagattaacaaaggacggaataaagttccaagagattctccatactattattttaatttttgaggggatgtataaattccatagtttcttgtagaagtttttagtttcggcatgtataatataactactaggatccaagttagacttctataatagtttataggc

SEQ ID NO: 15825 - DNA, 604 bp, Gossypium hirsutum
  Clone ID: LIB3829-031-Q6-K6-F11
cagccagccgttcacggtcggttgagtcatgcggccaagtcattcacgcaacggacggctcctctgaatacgccaagtggtatccgacggagttgccgaagaaaatttgttgaccaactactcactcctagcaccactttacgctgttcaagtctaagttcaggaaaacatacgctaccaacgaggaacacgattaccgattgcgagtcttcaaggttaacatgcgccgggccaagcgttatcagctcctggaccccactgccgttcacggcgttaccaagttctacgatttaactccatcggagttccgtcgtcagttcctcgtcttgaagccgatcaaactcccggttgatgctcagaatgctcctattcttccgactgatgatttacccgatgactttgactggcgcgaccaaggcgccgttaccggcgttaaagatcagggctcgcgtgggtcgtgctggtcctttagtacgactggagctttggagggagcccattatttggcgacaggtgagcttgtcagcttgagcgaacagtgagcttggtgattgtgatcacgagtgtgatccacatgagtatggcgcgtgtgactcatggtgta

SEQ ID NO: 15826 - DNA, 604 bp, Gossypium hirsutum
  unsure (1)..(604): unsure at all n locations; Clone ID: LIB3829-031-Q6-K6-F7
ttcagnatcatcacagctaattccacaacataactacaagcttgatgtgcatgctctgaacactcgtcaacctggtgagggaatttagagaatcaatccttggagttatgccacatcattgggataggagagaagatacattgttgaagttgtcacatttcaagcgacataagaggaaaacattgaaaagagtacctggaaagtcaacaacatatccttttcataagcctgaggaacaccatcctccagggaaggatgattcaaaaaaaatttcaaacttgattggaaaagctgccaagtatgccggttcagcaaaatctaagaagccagtggcttatattccaaccataacaaactacacccagctctggtgggttcctaacgttgttgtggcccatcaaaaggaagggattgaagctgttcatttggcatctggtcgaactgtatgcaagcttcatcttcaataaggaggccttcatgctgatatcaatggagatggagtcctggatcatgtccaggctgttggtggaaatggtgctgagcagacagttattagcggatcaatggaggtgctgcgaccttgttgggctgtggcaacctctgg

SEQ ID NO: 15827 - DNA, 589 bp, Gossypium hirsutum
  unsure (1)..(589): unsure at all n locations; Clone ID: LIB3829-031-Q6-K6-F8
cgnaaaagagaaaatgcatttcagtccacatcggtcaggctggtattcaagtcggaaatgcctgctgggaactttactgccttgaacatggaatccagcctgatggccagatgccaagtgacaagactgtcggaggaggtgatgatgcttttaacacctttttcagtgaaactggtgctggaaagcacgtccctcgtgctgtctttgtggatcttgagcctactgttattgatgaagtgaggactggtacttaccgtcagcttttccaccctgagcaactcatcagcggcaaggaagacgctgccaacaacttcgctcgtggccactacactattggcaaagagatcgttgacttgtgcttggaccgtatcaggaagcttgctgataactgtaccggccttcaaggtttccttgttttcaacgctgttggtggaggcactggatctggtcttggctccctccttttggagcgtttgtctgttgattatggcaagaaatccaagttgggtttcactgtcttcccatcaccccaggtctccacatctgttgttgagccctacaacagtgtcctctcaactcactccctttt

SEQ ID NO: 15828 - DNA, 585 bp, Gossypium hirsutum
  Clone ID: LIB3829-031-Q6-K6-G10
caaatacgcgaaagcaaagaagagaaacagtagtgtgaaataccaccaaatggcttcaagacctattgttcctcaacaacccagaggcgaggccgtagttcacaagcagacgaagaaaaacgtggcggccggagatggaaagagtcgccgtgcgttgggggatatcgggaatgtggtgaacgtaagagcagtggccgatggtaaaccggctcagattcagactcatcgtcccctcactaggtccttttgcgcacagttactcgccaatgcacaagccgccgccgtggctgagaacaacaagaaaaacgtatgtgttaatgtggaaaaagctccggccgccgtggccgtgccgcctaaaagaagtgttgctgctcctgctgctgcaccaccaaaggctgttcaaaagaaaccgaccgccaaacccgccgccccgtcggtggaagtgatcgaaatcagccccgatgtcgaagaaattgtggaagtgaaggagaaaaaggagaagaaagacaaggctgaagtgattaacaacaataaggaaagtaactcaaaaagagggttcacccaagaaaaaacatactttttctt

SEQ ID NO: 15829 - DNA, 562 bp, Gossypium hirsutum
  unsure (1)..(562): unsure at all n locations; Clone ID: LIB3829-031-Q6-K6-G11
ctcatattggnaaccagctacaattcaattctggcaaggggtgcatgtgcttcttttgtgttcggttttgtcacattcatgtcaatcggtgggttcccttcctttgtggaggacatgaaggttttccaaagggagaggttaaacggccactatggtgtaactgcatttgttatagggaatacactgtcagctatgccattcctcataatgataaccttcatctctggaactatttgttactttatggttcgtcttcacccaggctttgaacattatatgttcttcgtgttgtgcctttatgcgagtgttactgtggttgagagtttgatgatggccattgccagtatcgtccccaatttcctcatggggatcatcacaggagcagggattcagggaatattcatgcttgtttctggctacttcaggctcccaaacgacatcccaaaacctgtgtggcgttacccaatgtcctacatcagcttccatttctgggctttacagggacaataccaaaatgatctgaagggcctgttgtttgataatcaaccaccggagcttccca

SEQ ID NO: 15830 - DNA, 470 bp, Gossypium hirsutum
  unsure (1)..(470): unsure at all n locations; Clone ID: LIB3829-031-Q6-K6-G12
ccgnatattgccgctgcaccagcttcaaagctgagaaagagatggcatagatgttgtttcgccgcaacaaaattcgaatgccctngaaaccaagcctcaccggtgctaccttccggagagaaaatgggcggccaccatgcaggagccaaggaattcagcaacggatatcaacatttcgttgccagcaggttaatcttataaaatcagactcggaggctgactagactaaaatccctgatgtttttcgttcatcaaagagtacggagtgttatgtgttgttgaatattactgtaggatgatgaggtaggattaatatccagctaggttttaatgtctcaggcaaagacaatcttttcttctttttttagcctgattgatgagatttaccctagattttaaaagatcttccgattatgtagtagtgacatttttatcagttctattcatatggtttcatttatcattcaact

SEQ ID NO: 15831 - DNA, 588 bp, Gossypium hirsutum
  unsure (1)..(588): unsure at all n locations; Clone ID: LIB3829-031-Q6-K6-G7
gttccaaaaggcttactgcatcataccatatagatttcgacaccatggctggtgcagacaagtttgggaatgtctattttgtgcgcctaccacaagatgtatcagatgagatagaagaagacccaaccggtgngaaagataaaatgggaacagggaaggctcaatggagctcctaacaaggtagaggagattgttcagttccatattggagatgtggtaacttgcttgcagaaggcatctctgataccaggtggtggagagtgtgttctttatggtacagtaatggggagcttgggggcattgcttccattcacttcccgtgatgatgttgacttcttttctcacctagagatgcatatgagacaggagcacccgcccttgtgtggacgagatcatatggcttatagatctgcatatttccctgtcaaggacgttattgatggggatttgtgtgagcagtttcctaccctacctttggatttgcagagaaaaattgcagacgagttggatcggactccaggggagatattgaagaaacttgaagaaatccgaaacaaaattatctgaggtagctaacggcatcatgtt

SEQ ID NO: 15832 - DNA, 568 bp, Gossypium hirsutum
  Clone ID: LIB3829-031-Q6-K6-G8
gcatttgctaagggtgctataccttcatccataggtcatcttacaagattgcattacctcaatttgtctaccaactttttctctggtgaaatcctggatattggagtcctcagcacttttaggaacaactcgtttattggcaatttggatctatgtggccaacaggttaacaagccttgtcaaacttcactgggatttcctgcagtcttacctcatgctgaaagtgatgaagtagcagttcctacgaaacgatcatctcattacataaaaggtgtgatgattggtgcaatgttgacaatggtccttgtgcttgtcatgctccttgcattcctctggatatatctactatcaaagaaggaaagggctgttaaaagatacacggaagttaaaaagcaactcaaccacgatacgagtactaaacttataacttttcatggggatctaccgtatccttcatgtgagattatagaaaagctggagtcccttgatgaagaagatgtcgtggggtctgggggatttggtacggtatatcgaatggtcatgaatgattgtcaaacatttgctgtta

SEQ ID NO: 15833 - DNA, 569 bp, Gossypium hirsutum
  unsure (1)..(569): unsure at all n locations; Clone ID: LIB3829-031-Q6-K6-G9
gnaaagctggcattttgngattaacctgtatcatgctctgatatgcatgcatgtttagcatatggggttccgagaaacgttaacaagctattttccttatgcagaagcttcctatactgttggaggacaatcagtgagtgcagtagacattgaatgcactgttctaaaaatgaaccctgctacttatcatccacaaattgctgcagctgttgcacttcaaaaattcaactcttctaacgangcagaaaaagtatacaattgatcatgctgagcctcttctatattttgctttaagttgtgggctacattcttcgccggcggtgaggattttcagccctcaaaatgtgaatgagttgctaaaaaggtcaatgaaagattacattcaggcaactgttggtataagtaacaaagggaaactactggtacctaaattgctgcattgttttgccaaaggagttatcgaagactcacttttacctgaatggatttgtcgaatcttgacacctcagcaagcttccatggttagagaatgcttatctcgtaataagtggaagcttcttggtgctagg

SEQ ID NO: 15834 - DNA, 601 bp, Gossypium hirsutum
  unsure (1)..(601): unsure at all n locations; Clone ID: LIB3829-031-Q6-K6-H10
gtcggctttgcccttatgagtgccgttcttttaccgccgaaatctccccggcttcttcccggggtttcctcactccattccgtgaggtgtgtattaatagtgggatattgttgggatatgtttcgaactatgcgttttcgaagctgccgattaagatcggatggcggttgatgctcggcgttggagccatctcatcgattttcttggcatttgcagttttagcaatgccggagtccccgcgttggttggtcatgcaaggtcaattggatgaagccaaggttgtgcttgataaaactttagacaccaaaaaagaagctcaacttcgacttgatgacatcaaagaagccgccaaaatcccccaagattccaccaccggcaacatcatcccaaaacaaacaaacggagaaggggtttggagagaattactattacaccccacacccgctgttaagcacgtcttgatttgtgccatcgtgattcatttcttccaacaatcatccgggatatccgccgttgttntgtacagtccaagnatttttgagaaagccgggatcacatcatcagatggtaagctactcgcaaccatagccatcgggttttc

SEQ ID NO: 15835 - DNA, 609 bp, Gossypium hirsutum
  Clone ID: LIB3829-031-Q6-K6-H7
cttgcaatataagcaatgtccataagatcgttaaggcaagaaaaaggaagcatgttactggcattagcaatgctttatccttttgttgtactcatgggaggagtgctcatttggctattgacttgtacacgcaggcgatagagctaaatagtcagaatgtagtgtactgggctaatcgctcacttgctcacaccaaattggaagagtatggtagtgccatacaggatgctactaaggcaattgaagtggatcctaaatattcaaaggtagtcgataagcactaaaactgatttttcacagttttcttcttctatttcagcgacaccgaagactattctggacctgatggatttagatggactcaatctttaccatgttaagagccatttacaagaattacttgagttaggggacagtgttggaacacaaagtcggggtctcacccaagaacttatttcattgctacctgtttcaaaatactagtgcagcttattctcaaggaagaaatcaaggaaagagaggaaaaaccaactacattagattgcagtccaagaacaatttgcagaaggcacataatggctggctcctacccctacaaatgcatgtggg

SEQ ID NO: 15836 - DNA, 548 bp, Gossypium hirsutum
  Clone ID: LIB3829-031-Q6-N6-A10
ctgttattccttttttattatttcttcacaaatggaagaaattctcctacatctagtctccactagttcaggttccttatagatgtttatctgaggtattccatcatccttcagtatgttcatttttccaactgttccgattttgatgaaatggatcggttggaaatagttatttccttctcagtctggtagactgctccttatgtccaggtatagtcctgtcaaaatgaattttgagaattctgcaatatttgattattgcagcttgtaatccttctggaagaaacttcagttgagcttcttcgttgaaatagatacacatggctagtctagagtagagtagccttgttttgtcttccttggtagccattaggctggctatcccttgcttcagtccgttctttctgatgaaagtgattgggctttcatcatccttcttggctagaagaaatacctcttccattcctcgaatgagaattgggtttcttctgctaataggggtcctcctggcatcctgctgtttatgagctggggcatcataaacttgc

SEQ ID NO: 15837 - DNA, 493 bp, Gossypium hirsutum
  Clone ID: LIB3829-031-Q6-N6-A11
aagcaaacagataagcttaaaaatattcctttaaaatataccaaggacactaaacacgaccaaaatccacctcattcgcaaaatagaaatccggacggggagaaatctagggatctcctttaactaaataggggaaaacttgggggaaacactacattcaagggtcattgggggggggctctaaaccacaacaggaacctcgatattggttgggggagcaaggggttaaaaggccttcttttctggaaactcttcctcttccttgggaggggggatggggacaaaatcaggcaagggggtcattggaccctggttgccctttggatcccaatccagcaggattttaactttgatacccagcacaccctgcctaaaaaggacatgtctaacagcagaatcaatatattccttgacgggatgaccagaggatatcatgtacccatccttgaacttcatcgactttgcacgctgagctcggagttttccactcact

SEQ ID NO: 15838 - DNA, 559 bp, Gossypium hirsutum
  Clone ID: LIB3829-031-Q6-N6-A12
acatacgaacctacttatatatacagtaagtgcgtcaggtttaaaggcaaaacagggaacaaaatgtcaaaacatgaacataattcaaatttcaatgcctcatcttcaaactttggtggagacagagtcaagccggtacttccctcgtttactgcttccaaggctaatggcatacagttccgaactcttcaacacgcgcagcctctccactgtggacacaaacatgtgccacgggacatccccaacaagcatcctgtctccttcgttatcctcgtaaaccagtgtatattccccacttccatctaataagcccgtgatcgctttctcctcctgctgcttcttcactattccaccagcggaggaatctctttgagcagcaaggaggcctctgaagagttcatcaacagctgtcgagagtttttcatagctgtcataggctgttgagatcgactttcctgcctatgggaactccatccatgttgattttcacaaatttcgcactcggctctgcagcttttttttcattaccaaccttgtgagggagcacacttggtgatga

SEQ ID NO: 15839 - DNA, 469 bp, Gossypium hirsutum
  Clone ID: LIB3829-031-Q6-N6-A8
gattaaaataataaaagtatataataacactgattaaaatgataaaaatatataataacagtgcttaaattacaattttttattttcaatctctagaatgaaagtttataaaatttagatgaagtagttaggtcatcgttattattcaaatctccacgtatattaaatccacttctcttgcaatatatccaaaaatatgcgcataaacggattctttttttggggccaaatttacccttaacaaatccagaaatttaatttaaccctaaaagcttgccctcttcaatgaggttactgtaactgcagctcccaatggcgacttaccaacttcgatctcgaacgaatcgtaacgtctgaacagttccactacgaaaagccgagacaccagcaccacgaaatccttgccggcacactgtttgttcgccgtcgttggatcttcagtctcgggtccattcgaccaaagcacgtg

SEQ ID NO: 15840 - DNA, 568 bp, Gossypium hirsutum
  unsure (1)..(568): unsure at all n locations; Clone ID: LIB3829-031-Q6-N6-A9
gaagtaacgcatctctgtatatatatagcaaatcaaatgcctcgctgattagggaattatctctcagtgtcaatagatgtaccatgagaaagagtatgngaaaagttctttctgaagactaaccaattctacagagaaacaaggcatgaatatttaaataaaatccctccaacacaaaaatcattcaacaatatgcgccattttttactaagaatgccggaacttagagagcttgcatctccaagtttgtgctagtcccagagggtggtggtgtggaatcctggttttcattattggcggtcatctcttgaacaggaggagggttgacaacagtcattggcatgacaaagtcatctgatagccgtcccttcatctctctatgctcctggcataaagcacaccagtgcatgcagcaatgcaccatgcaaggatcacagggtgaattcttgagatgatactttttctgtaaggattgccgagaaaggccagtatatattccacacatccaccaagcaaacaacaaaccctcgtaaatgagaaatgttgtcttcggctcaataccatggac

SEQ ID NO: 15841 - DNA, 450 bp, Gossypium hirsutum
  unsure (1)..(450): unsure at all n locations; Clone ID: LIB3829-031-Q6-N6-B10
ggcaacaacaaatgcttgtttttgttgatttaaaactaaataaggcagatgatggtcagagttggaatccctcttacaagcaaacagcaccaccacattatttcaaagagtgctgcgcagtgcttacagaattaaagacaagaaagttaatattaaatccatgacacattacacacattttgtttcatcaaataacatgcaaacagatgataaaatgtgctgatgatgttcttatgaaggaatgcggacaccatgcatgcatgcatttgccacttcatgcttttgcttctattttcctttatgtatcatagncatggtagccatcccgtcatgtaattattcacactcgggcccccggtgaccgccgatatcgtatcgggctgatatccgatttgtaacgttggctcgcagtccaatggatggaagaagacatcaccctgaggctgatgg

SEQ ID NO: 15842 - DNA, 425 bp, Gossypium hirsutum
  Clone ID: LIB3829-031-Q6-N6-B11
gcattaaattagaacttctactgtcagcatgagcagcaacaaatagcatattttgacatattgacccctagatagcaacaacagttccagctacagttgaagacgggtgtacaagcattaacacagggtcgatttattctgtatgaaaaggaaaagagacacgtctgattcagctgaattctttcccttagactcagcctctgaattcatccatgaaacttttatggaaatctgttagacgggtgacgattgctggaatcttttcttcttgtgggagtattgtgcacctaaaatgccaagtgccaggaacctgcccaaagccagaaccaggaaccaaaacaattccagtagcagcaaggaggcgttgacagtagtatgcatcaggtgctttttttgcagcttcagcagctttgattgccttttca

SEQ ID NO: 15843 - DNA, 468 bp, Gossypium hirsutum
  Clone ID: LIB3829-031-Q6-N6-B12
cagtcactgaatcatgatacttttggaacatataaccaaaatatttcaattgatattatcatctcgtcatcggctctttctaatctaatctaagcacagattgcgaataccatccaaatgcagctgctacaatttgcatgtttgtagattcccaaagaactttagcagtaccggtagataccagttgcactcaaaattgacgccttggcctaaactcggccactgagactcgaattggtctgccatccaactcaacaccattaaatgttttgacaggaccatccacctcttcactagaattggaaggtacaaagccgaaaccccttgatctaccactttccctggcataaacaacttttggttccacaaccttgccttggtcactgaacaagggctccagggctaaatcatcaacgccccaccaaagggttcccaccttaacaccatttggagcacccctgggtgaac

SEQ ID NO: 15844 - DNA, 510 bp, Gossypium hirsutum
  Clone ID: LIB3829-031-Q6-N6-B7
tcgcgatctctcagatcagctttgaagtaattgaaatcaaggaagtgaaacccaatggcatctaaattctggactcagggtggtagtgacactgaagaagaggagactgatattgaagatgaaattgagaatgggggagctggagaaaccacagccgccgctgccggaagcagatatctacaaacaaatgctagtgatagtgatgattccgatgggcaaaagagggtggttagatccgccaaagataagaggtttgaggagatggcaagtacggttgatcagatgaagaatgcaatgaaaatcaatgactgggttagcttgcaagagagttttgataagattaataaacagttggagaaggttatgcgtgtaaccgagtctgacagagttccgaatctttatattaaagtgtcttgttatgttgggaagatttcttagcctgaagcttttggctaattaagggaagccccaaaagaaaatggagtaggcagttaattcacaaagggcttt

SEQ ID NO: 15845 - DNA, 482 bp, Gossypium hirsutum
  Clone ID: LIB3829-031-Q6-N6-B8
aataaaaaaacattaagcatagatccattaaaacatgttttgaaatttgatactacaatagagaagacaaacaaaagaacccatttttattagctgaccaataagtccattggcagattttactctatattctagcctagtactcatccccttcatcttcatctccttcaccagattccaagcccacttcttcataatctttctcaagagcagccaagtcttctctagcttcagaaaactcaccttcctccataccctcaccaacataccaatgcacaaatgcacgctttgcatacatcagatcaaacttatgatcaatccttgagaacacttcagcaacacttgtagaatttgaaatcatgcaaactgccctttgaaccttagccaaatccccaccaggtaccacagttggaggctggtagttgatgccacacttgaaccctgtgggacaccaatcaacaaactggatgggccttttgggc

SEQ ID NO: 15846 - DNA, 364 bp, Gossypium hirsutum
  Clone ID: LIB3829-031-Q6-N6-B9
atcactcaagtttcataagaacaattaatttcttgattttgcaaacagaaatatatatatatatatataacaaagaagaagtgaagaacctaatctccatttattaaatgtttattgatctgacatgctcatattttacatatatattttaaccatatgattgggtaatattaaccatgtcaaagattaaaaaagaagatattgcatgtactgaaaagaacgggctttttttagtagtactcccacgcgaatggctcctcgatcctgaaaccagcatcgactggacatacttgccacgttgaagaataagagcagagcccatcgcttcgatcgatggcatcaatcgtgagatcgggccaatcaa

SEQ ID NO: 15847 - DNA, 554 bp, Gossypium hirsutum
  unsure (1)..(554): unsure at all n locations; Clone ID: LIB3829-031-Q6-N6-C10
aaaaacattaatttagacatcttaaaagaagagacatgngaaaagaataagctcaggtattacactagcagccggtaaggatatgatacatgtcacaatcaactaattaaatgacatacctaacactcaattctcttctttaagtccaccacaggctaagtgataccttaagagtaaatgtctttcgcagagggcatctcggaggcagcattcgcggtggttagcacgtttgcgggctatttcgttcggctttgatagtttcggtcttttttgtagctttctcattcacattctcttcacgctgtcaccatgaagaacaacaaatccctcactggctagagttgcaactgcagttcttagatcatgaaggtgaatttcactgccagagttttgcttcttcatttcatctagtaactctagcaatcgcattgatggtcccccaagttgtagcttatccattattatgttgcgtgttgctgataacacactctccctcctcatcctttcacttgcagaaactccagtggtgataaagatccatatcaatagttcct

SEQ ID NO: 15848 - DNA, 76 bp, Gossypium hirsutum
  Clone ID: LIB3829-031-Q6-N6-C11
ctctctctctctctctctctctctctctctctctctctctctctctctctctctctctctctctctctctctctct

SEQ ID NO: 15849 - DNA, 554 bp, Gossypium hirsutum
  Clone ID: LIB3829-031-Q6-N6-C12
atataaaagatgatctttacttagtaaactttttcaaatatacaaagagaaaaagaaaatggtgcatcataatttaatacttttatgacaaacaggcaggcccccgtcaacagcacatttcaccggttaacttttaatttactttccagaaatctctaatctggcaaagtcattatgagcaagtatttaacaaacctttatatgcaaaaggcacttacgttattacccaagagtatgtgtattgaatcaattactgtggtaaactgatggtcgaacgtggaacgccatctaccaccacccagcatcattcggaggagaaactcaattcatcgatagctacggacgattctgtgttgatcacattaacagtttctttcttttcagtcggatctttggttacattttcttcttttgcttctgctgcagttatacactcctggaatctgaaacaacttgtgagatggtcgtttgttattcccgccacttgcatgaaagagtagatgactgtcggccccacgcttcggaaacctcttcttacgagatctttgcttatg

SEQ ID NO: 15850 - DNA, 553 bp, Gossypium hirsutum
  Clone ID: LIB3829-031-Q6-N6-C7
gattattaataaatgtaatcttttcttcgatattatttcatcaaaaactgcataatgtctaatggaaacaacactattttttatgaaaaactgaacaaatgagaaacaaataatgaagtactgctaacataataccaattcaaagttcaagctttgaataaggatttaattacagaaacgacatgagaaagacatattacatgacaactaaattcagaggctaatccacaatcaaatatgactacagcttgtttaccgataacctcgcaaatgatctcgtgcgaagaatttcactctccttcactcaaaatggggacaatgagtggtttcatttgtgcaagatatacaattgcccacatcatccaacaacagaccgttgctgtaatgaccagtgttaggtggagcagattagcagagggacctctgttacagcagattctggtacaaagcgatgcaattatcccaattacagcaaaaatcaggggttgttaccaagaaacccatattccagatgtcgattttacacaaaatttcctttttgtttgatttctga

SEQ ID NO: 15851 - DNA, 532 bp, Gossypium hirsutum
  unsure (1)..(532): unsure at all n locations; Clone ID: LIB3829-031-Q6-N6-C8
cggacncnagtggttatgcgtgtttgctgttccgtggctttccttctttcctctttttcctctcnttcctctgcctctccccttcccntntttncnntctttcctttttcctttnctnnnntgttccccctcttgggggcgggggcgtcttctctctttttccctccctcgtctggggtctcccccccctccttttgctctctctctttctctttcccccgcgcttcttgttgtcttccctttcnccttttctcccctctcccctcccctgccttgcgctcctccccccccccccctggcccctcctgctctttcccccccccccctgggtttcttccccctctctccccccgcctccgccccccgctccctcccttcccctccccccctcctccccctcgtcctgttccctcgccttcctcctcctcgcttcccccccggcgtggttttctccccctccccccccggccccccgcccccccccccccccccccccccccccccccccgccccccccccccccccccccccc

SEQ ID NO: 15852 - DNA, 527 bp, Gossypium hirsutum
  unsure (1)..(527): unsure at all n locations; Clone ID: LIB3829-031-Q6-N6-C9
aacataaacaacaactaaatataacaaaaacaatgatcaaacgatcacaatatacatccatccatccatccttccatacatacatgcatacatatatatatatatagtggttttatatattacccatattatacattatagcatactgaagttccatggataatatggcacaaattatactaatcaatcattaaatttcacacattttgcttcaattttcatggcacttaaccatgtatggcaactccaggaatctccatcatcaacggtattgactcaacaatcttggacggcttgttatcgaaaggtgtctccgcgtcgtaagctgagagatgcactccaagtgctgctctgcccgacgggtcaaaggttgttcttccaagtggcatcccattcgacagctttggccgtgctgcatgctacacttgctcctcccgggacggtcaatcgtgctgagttctgagggaagaacctttccgaaatcatcctataatagtatgcttccttttcgtggtcggantgttgtg

SEQ ID NO: 15853 - DNA, 524 bp, Gossypium hirsutum
  Clone ID: LIB3829-031-Q6-N6-D10
aaatctcaaggcatgaccatttgttcatatatctcatatagatactgtacttcacactgcatttaattaaattgcaatgtctacccccgccccccccttttttctattaaacaaatgaagatatagtaaatcaattcaagaactgcttaaaacgaccattttcttcttctttttcttatatcaaatccacgatagtggttagaataagtgaagaaaaactagttgacaaagcaaagaaaaactcaacgtgcagatcaaagaacaaagagatttaagggctaatgggggttgatcattcatcattgcatgatcaacttgccgtcactctccttccccttctgttgtggctgaagacatgtaactcatagcaagtgaggtctcatcatctggaccagcacctgttgatgtttggaactgatgcttgcaagtttgacaggggatctgcatgattggtgcacttatcttctttttgggcttgatttttcaggggttgggcctttttcccattgacccttgggcttggg

SEQ ID NO: 15854 - DNA, 442 bp, Gossypium hirsutum
  Clone ID: LIB3829-031-Q6-N6-D11
gaaatatccatggatttaaagtaggaaattcatgtaaaagatgaggttgaagtttacattagagaaatggaatatttatgtatctaggtcaacaaaaccattgaacaaaagaaagagatattcacctaatctattatcaactacggcaaaacgcacacttccaaacaaaaatatatgcttacttaaacttcataaaaaaacaaatcctagagattccttgtgctccactagcagtccatatttcatttgccatatcaatcaatcaatcaatcgtaccatttctttgtttcttttggagccccacttcaccttgcattgttgggaacccactgctttgatagaagaagcaccaggctaattgaaaatcaccacgaatctcactgaccggaaattgatctgagtgtataagttctggcttgctgcaactcatgtattaatcatg

SEQ ID NO: 15855 - DNA, 438 bp, Gossypium hirsutum
  Clone ID: LIB3829-031-Q6-N6-D12
catccaatcatttatctatgcaagtctatataacttggagtaaatacaagaagtataattttttttcatacattatataaatgcttagtcttaattggagtgtcagattcagaaaactcaccatgaaacttaaaaccaatcagctttacaacacaactcaccgtatggtctgtgcactgggtcgggtccaaatctgctaaccaagcttaaccctgcactgggttgggaacaactgaccacaagcaataccaggaaaatatatccgactcagttaattggttccttcctgaaaaaggatgggaaactgaaaaaaaaacaccaaattcataagttctgacaatctaaggccttgatagtctgtcgatgccaaattgcaggctctggatcaaatctcagctcccatgtaggcccctaatgcaaaacctgctttaatgttaa

SEQ ID NO: 15856 - DNA, 346 bp, Gossypium hirsutum
  Clone ID: LIB3829-031-Q6-N6-D9
agataaaagagtcattttcattggtttaaattattttttttttaaagacggttaacatataatatctagaatcacacagggaaagataatttggtcttttccttcttttacatgcgaagaaagcaatcaacttgacacagcaggagggttttcctttggatgtttagagccctaatgatcaccaaggtgtttttcatttgctaattgcaccttgcagatagggcagctgactttgagggctacagctctggcctccagctgagaaccctttggcttttgattcttctcagcgtttcgcctctgcgcttcgatcttttgttttcctcgcggcatctcttcctcgctc

SEQ ID NO: 15857 - DNA, 54 bp, Gossypium hirsutum
  unsure (1)..(54): unsure at all n locations; Clone ID: LIB3829-031-Q6-N6-E10
tctctntctctctctctctctctctctctctctctctctctctctctctctctc

SEQ ID NO: 15858 - DNA, 521 bp, Gossypium hirsutum
  Clone ID: LIB3829-031-Q6-N6-E11
aaaatccagatttaagcatattggcatatggcatctatgcatccctcacaatacataatccaaaggaaagcaaattggtccatgccaattaaggtacatttattatccaatccaccctcaagcatgaagaaggtctaaattctagttcctagcatgcactaaacctagagcaattcctttgcttttttcgtccaaatatcgtagatatcatcagcaaatagaacaaagtgcacctctttaatgtcattggcaaattctttgatagtagataaagcaactgtagctgcttcctcataagggtacccgtatacaccgcaagatatggaaggaaacgcgatgtatttaatgttgttctctttagccacagttaagcaatttttgtatgcatttctcagtgagcctttagggtccttgtcggaatcataaatcggtccaacagtgtgaatcacatgagatgcaggcaatttaaatcctggggtaatccttgcttctccggtgggacaacgaataccaggttgaac

SEQ ID NO: 15859 - DNA, 546 bp, Gossypium hirsutum
  Clone ID: LIB3829-031-Q6-N6-E12
ggacataggcgcaaaacacactaatcgcattggaaaatggcaacaccaaattacaatatcaaaaccctaaaattaacattttataaactgccatccaagtttaacccaaaagttgacttccaagtaaactctctgcttctctgtttcttatttacacattccttaacataaaactctacgctattaaaaatccatttctcctcacataatggcacaagcattagggttctcgtcattgaacatgtggtgaggaggatgaacagatactgggtaacccggcacgtacccggagtagccgtgcccgtaaccgaacccatagcccgggtgctcatatcccgagtaagcgggcatgtatccaaatgtggggttgaaccataaattccatcttgctcccttccattttaccaccaccaccaccaccatgtccaccatcttcggcaccgccattgccacctttgttcttctttttccctccatcaccgccgccaccattctcgccaccctcatttttgccatctttctctttcttagggggcacaatctcaa

SEQ ID NO: 15860 - DNA, 504 bp, Gossypium hirsutum
  Clone ID: LIB3829-031-Q6-N6-E8
gtaggtgaaaacataatatatttaatccataattgtcacattacacgacaaacgtcatcgaacaaaaagagacgaacactaatgaccaaagggccggtgcaaaccatgagtccataatcatccccacctacccctcttattaatcatcctcattatcaccatgataattattattattctaactaaaacgcatcaaatgctagagctagacttcctatgacgacgatcatcgggaacctccgagggacaatagtttctaatggcggtgagatcataaggtggggcatcgagcgccaaccactgctccaccgtgaactgctgctggctacaaggtttatggacgccagtcatggtaacttccacatagttacagtaccatccatggtgctcacccgaaccatcggaggtcaagttcatggcacaaagaggggcatccaagcaacgtcccctacttgagaaaatgtccaaattacccctctcgaaatagttgtacccacgcgtccg

SEQ ID NO: 15861 - DNA, 561 bp, Gossypium hirsutum
  Clone ID: LIB3829-031-Q6-N6-E9
gaaaacgaaaggatagctagaagaactttgcactcttgtcaagtttggcatatcatacagcaaatcttacaatttcactaacgttggcatttactatacaaaggtaaagttttcacatttatacaaaagaatgaagcttttagtattttaggatgtttgctgcattgctaggctcctcctgctgtatctcagttatgttacctttaaatattgtgctcttgaacaacttttagatacttggcctcatttcacggtcaggattgtatatattagtatatttctaaccttctattgattgtactggaagacttgcatatttgacccataaagatttctcgcatggtaagtttgtaagtagcaaaagcagtcaagaacccttttttctttcaggtgtgattttgggctacaaagcagggttaatcctcttatttttgaaaacctcacctttccatgttaacagtctctgtttatttcacagaataatttttggaaaaccttgctttgagaaagccttaattgtaaagagatgaaaggttttctttttgagtaacatagcacgag

SEQ ID NO: 15862 - DNA, 431 bp, Gossypium hirsutum
  Clone ID: LIB3829-031-Q6-N6-F11
gggaaaaatacttactgatatatgaatgtataacaatgctaatgctacttaccatttagttacaaagccaatctaacgcgatagctgctgcctttttaaatatgcaaggctgatacactaaacaccatggagtccaattcacaaacattgttacctttacaaatattgtaatattcgttttccccccaaatttctccccatgaattctttatgatccactaaggcttgtttttaaatctaaccggtgcttaaccagcggattcctaccctacaatgaggactccatggtgcaaatgtttcccacaaatatatgggcatgaaaccccctgaatggatgtctgcatgaaaacggaattgatacccactggaagagggccatgcttaaccaaatttgcagggacatggggctcatcaatggatatgacgctgaa

SEQ ID NO: 15863 - DNA, 503 bp, Gossypium hirsutum
  Clone ID: LIB3829-031-Q6-N6-F12
gcaagtacaagcttcttgtttcagaaaattttattccaaactctgaaaaccaacaatttaggcatcttgagatatctcagtcatttgttgatcatgaacacatacaaaaaagggaagcaatatgagaaaaaagtcttaggattgaaccaaagctggttaagaaaatgattaacctgtgatagctgaattcatagcactgtgaacgtcaacacctatttgggcttcagctttctccagatcagttgtagccgagacaagcttttgagtaaagtcagccagacccttctggaccaaggctgggtcaaggcggtcgactggcactgcttccacagcaataatatccgcaacagagttggcatggataagagcaaaaccactgctaaggaaatattttgggacatcatttccttcatgcaccgacaagatcccagggttcagttcagcaattgtagggacatgtccaggcaaaatacccatctgtccagttgttgctggaactatta

SEQ ID NO: 15864 - DNA, 387 bp, Gossypium hirsutum
  Clone ID: LIB3829-031-Q6-N6-F7
accaccacaatcaattatgatgattgaaattgaaaaaaaaatcgagacttcacaaaatttatggtaaaactttcttgaacttcaaaacaagttacatgatccacctccattctcaatccaaatctgcataacataaatcatacaaagtcgagaactatgagcctaaaaatcttcgatctcttggaattccagagtgttgtaacttctattacagccatctttcactcaactgtcgggtgatctttggtagtcaagactataaaacgaaactgcttttttaccgtggaccagatgaagcacgaggtttacccttcattgaatttaagtgttgagtgacaaagagtactcccatcacaagtaaaaggcaaccgaccagtgtgctgaaaa

SEQ ID NO: 15865 - DNA, 343 bp, Gossypium hirsutum
  Clone ID: LIB3829-031-Q6-N6-F8
gagccgaactactcggcaaatctattggaggccatatagtcttgaacaaagcttaaaaaaggcgaagttccccccatagaataagccaaaaccccgataaaaggaaacaaatcattgggtagcaaaatgcaagccctccactcaaacattacttatttaggactcattttcacctttcttataacccttggctggcttaggaccgacttttttataatcctttttaagggcagcaagggcctcacgagcttccgagaattttccttttttcataccctcacccacggaccagggaacaaaggcacccttgggatacatgagaacaaacttgggggcaatgggg

SEQ ID NO: 15866 - DNA, 441 bp, Gossypium hirsutum
  Clone ID: LIB3829-031-Q6-N6-F9
aaaaggaagaaagaagcagctatggatttttgtatttgatgtatgtgattgggctattacatgtttccagcattgcagatttttggcaaggcatctcagagtatgaaaattgtaaagcagatagatatgaataagaagcaaaagttatattaagaatggagttttccacctagtgtgagtgtgttcatatactaagacagcaaaaaagaaatggaaaagacaacatgaaggattgcagagacaactgagaagttcctccctcccctttgctccccctcccacctagtcgtatcaaatgccaaatgtctcgactgttgccgctctttacatttgcttttaactcattggaggttgcagcctaactgcttttctttctttctctctctctcaactgcattagcagctttgcgggacactattctcagcacattgtgcttcttc

SEQ ID NO: 15867 - DNA, 463 bp, Gossypium hirsutum
  Clone ID: LIB3829-031-Q6-N6-G10
gttcttcctaagctgaagaaacaacaccggataatagattctggcatgccggaatcaacgcgaccgctccacgtagcgaactcgagtacttcctatacacaacttgaagcctactatcaatagcctttgaatggaaacaagccagcaacttagcacattccatcagctgctgttcgttatacccggtgtggaacttgagggtgtctgtccaagctggtgtcttcttcaaggtgcaccgtgcggcatacacagccgaagcagccaccatcgacggacaatacctaatggtctcgtaatgcattatccccaactcagcttagaaatacaccatgttttccatcttcgggtcagggatcgatgctttgatgaaccgggctcagaacacgtaatgtgtaggcaccggtaaagtccattccaatcggcccaatagggtttctcccttatgaggaacctggtcatgtgg

SEQ ID NO: 15868 - DNA, 565 bp, Gossypium hirsutum
  unsure (1)..(565): unsure at all n locations; Clone ID: LIB3829-031-Q6-N6-G11
gaatggcattgcttgtatatatattatcttcaaacgcacaatacagattgttgcatataattttaaagcaaattctatatagatgaaataaggcataaggattaaatgttaggaaactgaggtcgttgtaggattgtttgtatctcgagactcaaaggcgatcgcatgaatgcaagcataccctgctgtctaccttttaccccttccattagctcgatttgcgacatagttcctcagcgaaggagattgcgagagagagggtgcaaccatcgtattttgtgttccattcttttgttgcatccttctcctggctaccaaacctctgatccaaggggtaacatcctcgctgatctttatcatcaagaagaagatgatgcggtaaattatgatcatgctgaatatcacacttagatcgatccatttcgaccgtcggacgtcgatttggaacacgttttcaaggatgtattcgccaggaatcttgggaagctccggtggttgattatcaaacaacaggcccttcagatcattntggtattgtccctgtaaagcccagaaatggaagctg

SEQ ID NO: 15869 - DNA, 471 bp, Gossypium hirsutum
  Clone ID: LIB3829-031-Q6-N6-G12
agttgaatgataaatgaaaccatatgaatagaactgataaaaagtcactactacataatcggaagatcttttaaaatctagggtaaatctcatcaatcaggctaaaaaaagaagaaaagattgtctttgcctgagacattaaaacctagctggatattaatcctacctcatcatcctacagtaatattcaacaacacataacactccgtactctttgatgaacgaaaaacatcagggattttagtctagtcagcctccgagtctgattttataagattaacctgctggcaacgaaatgttgatatccgttgctgaattccttggctcctgcatggtggccgcccaattttctctccggaaggtagcaccggtgaggcttggtttcagggcattcgaattttgttgcggcgaaacaacatctatgccatcctctttctcagcatttgaagctggtgcagcggcaatactcgg

SEQ ID NO: 15870 - DNA, 577 bp, Gossypium hirsutum
  Clone ID: LIB3829-031-Q6-N6-G8
gaatgaagatccatctggtaataaaagtgaaaaaatgtctcaagcaatatttgttttcagcactgcagtttcaagtcactgtcacagcacaagtgacaaggattcaaaaccatgcacacatagatcaatttcgagataatatacaaaagccccctagagtgggacaaaatcgaagaacatcctacgaaagtcgagatgacagcagattttatgtgcaacaaccaccgttaaatcaatatttgtatgttcattcaacaataatctgaatgagactcgtaatcacttgggtaaggcgacatgacctcttgttccagtaactgaagtacctggcacattgttggccgttcatctggatttgcatcagtacacttcgctgctatttcgagaattgcttcgacagtttccatgatagcatcagtacaccctttatcaactatgtcttccagacggttctctctcaataaagtgtttgtccagccgacaacattcaagcccctctttgcaaaagttgggatcagttggccttttcccggttaccagctccagtaagagaactccaaagctgtagacatccgtc

SEQ ID NO: 15871 - DNA, 456 bp, Gossypium hirsutum
  Clone ID: LIB3829-031-Q6-N6-G9
aaaaaaaaaaaggaccccgggggggaatttttcccccgggaaaaaacgggggaagggggaaaaattaaaaggggaaaaaaaaaaagggaaacccccctggggggaaaaaaagcccccccccctttgggggaaaaaaaaaaaaaaagggggggctttaaaaaggaaagaaaggggggccccccccccccccccaagggaaaaaaaaaccaaccccaaaaaaaggggggaaaaaaaaaaaccccccaaccccaaaaagccccccctttaaaaaaaaaaaaccttttcaaacccgggaacctgggggggggggaaaaaatccaaaaaccccttgggggaaaaggggggcttaaaaaaccccttggggaaaaaaagggcgaattttggggccccggggttccccttgggtacaaaaacaaaaggggggcgggagggaaattttaagggcccttttaaaaa

SEQ ID NO: 15872 - DNA, 509 bp, Gossypium hirsutum
  Clone ID: LIB3829-031-Q6-N6-H10
agcaatatcttatcattcaatggtaacatcattcattttcttagatgcctccttccaacaaaccaatttaccaaaaagacattcaatttcgtcgagtgttttcccacgcgtctcaggcatacacacactagaaaaacacccatccaacggtggcaatgccagtaaataagaaaaaagcaccgccgatagtgatagctttgtacaaggaaataaatgtcattgagatgatcccgctcaccaccctattcaccgccactcccatactcaccccttatgcacgtagcctcaacggaaagatctccgacatgtaaacattggttatcggccccattccgatcgcaaaaaatgagacgaaagctaaaaccatcgtcatacacaagacaatggcccacgttagttttgtctcccaatggtcggcgatcgttagggaaaacccgagtgtcgctagcgacactaccatgcctccaacgctgcttaagagcaaaacacgacgaccgattttgtcaagt

SEQ ID NO: 15873 - DNA, 500 bp, Gossypium hirsutum
  Clone ID: LIB3829-031-Q6-N6-H11
gaaacaaacgctttgtaatctcaaaatcaaaatacggcattgcacattcattccaacttttgagtacattagcttcatataataactgtacagccaaaaggcatatactggaaaaactgaatgcccaagttctggagacgattcacccactatacttggtaggtaagcaactttggttcaggaccttgattctgttatcaggcataaagaggcgaagcagatggctgagggtacgcagtcgtactccttccaccggtagcatcatctgcactttgcctacgtctccgaggtacgctgttagtattgttgtgattaattctggagtcgttagaatcctggaggtgctccaatgcagttacaacctcattcatgcttggtctgaactttgcatcgatcgacaggcatcgcaaagcaagggtaacagccttaaaggctccttcgattggatactgcccttcaaggcgattatctaggacacgaaaaatttgcgtttgttggca

SEQ ID NO: 15874 - DNA, 477 bp, Gossypium hirsutum
  unsure (1)..(477): unsure at all n locations; Clone ID: LIB3829-031-Q6-N6-H7
agaataattagttgacacgagattattattaaatatatgcaaatatgcaagtagactattacaaaactaggcgtagtttttgatcaactaattaggtaatcctactgcagattctatctataatctgcttaactaacatacaaacatatggcactctaatacttttttgcagataaaatatctgaaactcacacctgaattcggattcagagcacatacggtgtcaactgcatgttgatcaatatcattcttattcgctgctgcaatgcctcccacatgcatttgtaggggtaggagccagccattatgtgccttctgcaaattgttcttggactgcaatctaatgtagttggnttttcctctctttccttgatttcttccttgagaataagctgcactagtattttgaaacaggtagcaatgaaataagttcttgggtgagaccccgactttgtgttccaacactgtcccctaact

SEQ ID NO: 15875 - DNA, 426 bp, Gossypium hirsutum
  Clone ID: LIB3829-031-Q6-N6-H8
gggaagaaaaccaacttttattcattagttctcagcctttcttccaatgaaaatccaaaaaggattaaaacccagaaatcgagaaacaaaggccaataactcaaagaaagagaaaaacaaaagtaaagaacatggtttttctgagtacaaattcaaacaaatggagagacaaagtttataaaaagcttaaaagcctggaggcttgtaggcaatgaaactaatgcactgcacttgacgcacgttgtcgaagccaatgattctaatgaatgcattggggtattccttcttgcattcctcaagctccttcaatacctgagccgagtcggtgcacccgaacataggcagcttccacatggtccagtagcgtccatcgtagtacgtgggtaggctcgagtatttacggggcacgaatccctcctctaattc

SEQ ID NO: 15876 - DNA, 276 bp, Gossypium hirsutum
  Clone ID: LIB3829-031-Q6-N6-H9
atgccaaacgtttttattgtatatagcgaatataaacatttttttttattggcaccgcatgatctggattttgatactgaagtgtctggtcacccccatgaaatattatttatgataatttaacatagggactagccttagaaaagctttagaacaatgcggcttggtaaaacgtcatactcactagggtgcatttttatcacctcagtcataccgcgaacaactcaacaagtaattcactttttgctgccggatataaaacagagccctgggggg

SEQ ID NO: 15877 - DNA, 574 bp, Gossypium hirsutum
  unsure (1)..(574): unsure at all n locations; Clone ID: LIB3829-032-Q6-K6-A10
anaaactctgcagnggaaagcttagtttgaccaatgtcaaggcgcttctgttggtaatgcgagtttgagtttttttgaccaatgtcaaggcgcttctgttggtaagtcgagtttgagtttttactttccaagttgcatattcgtaaattaatgacaaatattcttgaattttgcattggcagaatctattcactgctggcaccgacacatcctcaagcataatcgaatgggctttagctgaaatcctgaagaacccaaaaatactgaacaaagctcacgaggagatggataaggtgattggcagaaaccgaaggcttgaagaatccgacatacccaagcttccctatcttcaagccatttgcaaagagaccttccgaaagcatccatctactcccttgaacttgcctcgagtgtccacccaggcttgcgagatcaatggctactacatccccaaaaacaccaggctgagtgtcaacatttgggccattggccgagaccctgacgtgtggggcaacccactggatttcacccctgaaaggtttctgagtgggagatttgccaaaatcgacccacg

SEQ ID NO: 15878 - DNA, 605 bp, Gossypium hirsutum
  unsure (1)..(605): unsure at all n locations; Clone ID: LIB3829-032-Q6-K6-A11
ccgggtcgaccccgcgtccggccgcggnacgccattgttgagaaggnaatcaacactttcaacattaccctccgctcttactcccttctccttttctaaacccctaaaccctaaatccactttgttctctttctctcagtctccactccttggccctgtcgccgtcctttcttattcttttcctctaaggactatctcctccattcccaaacgcctacaccgccgtttggagtgcgtctcttctggtaccggcggcggatttggtggaaatgatgggagtagcggcggcggtggcggcggcggcggggaaggaacgggtggaggtgattcgaaggcgaaattgggagctggagtggttgacgatctctctgccttgtctcccgatgttatcattcttaatgttgggggaatgatgtgcggcgggtgtgcttcgagtgtgaagaaaatactagaaagtcaaccccaagtctcttccgcgaccgtcgatcttaaaacggcgacggcaatggtgtggcctgtttccgaagccaaggctgtacccaattggcaaaaggaattgggggaggcattagctaaacagttgactagttctggtttcgaatctg

SEQ ID NO: 15879 - DNA, 566 bp, Gossypium hirsutum
  Clone ID: LIB3829-032-Q6-K6-A12
caatacttgtgttgatcacaaagtcttctcttacgatatcttgagaaactttgaagaactgcaatatcaagatagcttttggccggttctaccaaatccaaggctaccgtgatttggacctctttattcagcaaaggatggcaaaagtttgtggatcctgagaagcaaaatgggctatgctctcgtttgaaggtggaaatgcttcacccattgcgtgtcatcatcgcaaaccgggggcctgatacagaacttctggttgctaatccagttgagttatctggaaaggggagaccaagagttttctatgatgttacactagctttaaaggctcttggaatttgcatattttcggctgaaattggaagatattcgagttcagatcgagaatgggaagtctacagattccttttggatgagaactgcggattccaattattgagtacgttagctagaaatcagattgtagatagagttagaagaatgctgatgggttggtgagtgcagtcaatcttctttgtacatgtcttatgagtccctccataactaagatgttattttctcctggt

SEQ ID NO: 15880 - DNA, 577 bp, Gossypium hirsutum
  unsure (1)..(577): unsure at all n locations; Clone ID: LIB3829-032-Q6-K6-A7
gnaagaacaggtattgggatccctttaattgcccaggatagggttttcatgccatttatgcaggcagatagttcgacttcgagaaatacggtgggacaggtataggcttgagcattaccaagtgtttggttgagctaatgggtggtcacataagctttgttagccggccacaagttggaagcacattctcatttactgcagccttcgggagatgtaaaaaagcttcatttagtgataccaaaaaatccaataccgaagatcttccttccagtttccaaggattgaaagcaatagtagttgacgggaaaccagttagagctgctgtaacccgataccacttgaagaggctcggtatgctggttgaagttggaagtagtgtaaagatggcagcttctgcatgtgggaaaaacgtctcttcatgtggaactaaaaaccagccggatataattcttgttgagaaggattcatggctttctggcgaggatggcggtttgagtttagggatgttggatcggaagcagaatggacatgtgtttaaattgcctaagatgattcttcttgcgacgaatattacgaa

SEQ ID NO: 15881 - DNA, 598 bp, Gossypium hirsutum
  Clone ID: LIB3829-032-Q6-K6-A8
aaaagttggactgcaaagaaaaaccacaattaaatcttgaagcagaactgcaaagaaggagtctgaagttgattcaagtgcttgggcatcagctggaggggttaatgaaaactctaagaaggctttaatggaccttctttaccaaaaacttggtattcaatctatgcaatcatcagaaatcgatcgtcagaattctacttcatcttccagagggcgggaaaccttttggcctgtttctgagcaacaaacttccaattttccttttaatcattttccaaatcaggaagttcatgtgaacaacttgtttccggaaggccctcaaaattctaattcaagtgccttgttgcaagatcatttgtttggagttgctccaagcgcatctgccaaccacatggttaactgtgaaagattgcctcttaaagccaattttggctcatttgcagaagagcagtcattcttgttgggcattgaagatccttctcgtagtagctatgtagatgctagcttgatgggaaaatcagctgtggatatagaaatagcagaactggaaggaaaagacaaagaaaatggaatgaaaggcatgagtaataggaatggt

SEQ ID NO: 15882 - DNA, 567 bp, Gossypium hirsutum
  unsure (1)..(567): unsure at all n locations; Clone ID: LIB3829-032-Q6-K6-A9
gggctgtcaaggctgaagnacatgttgngaaacagtcctgccagtctcgaatcctttgattgctccaacccccacaggggacagaacctgttctggcaagctgtccatcaatgcaagcatcccagcaacacagaagctcagtcatggctagcagattgtaccgtcaaataaagcaagaagtcgagcctgagccctactggttccctcaactcccacctattgacccctctctctgctatagtgacagtagccacgaattccacttcactgttgagagttccaatgaaaatttttgctctttggagtcatcctctgcaaatggcagttataatgcctacaactctacatcacttgtcggtttctcaccaaatggaagcccaacgtcacagcaagattctcagtcgtatccatccgacttgcatcactctcctgacaataatggtggctctcctattagtggttcctgcgtaaccgatgatgtaagtgatttgagggataagctgaaagagctggaaactgtgatgttgggccctgattctgatgttattgacagtaagacctcaccag

SEQ ID NO: 15883 - DNA, 551 bp, Gossypium hirsutum
  unsure (1)..(551): unsure at all n locations; Clone ID: LIB3829-032-Q6-K6-B10
ttttgattgattcgagcccgagacctgattcacttaaagagttttcaagcagaccatgcttgatcaagatatcatattcagaaagcaggtctgtgagctccatcgtttgtatagtgttcagaagactctaatgaaggatcttacaacaccggnnagcttgaaaagtacaattcatggaaagcaaatctacaatcttttccccaaaaaaacaagattgcccacaaattcaattcccctgttagactcgggagtatcttcaagtctggagttgttagaagggtggaaggacaataactataagtatcagcctaggcctttcgaccgtcaacttgtacctgatcggtatattcgccttggagataataataaccttccaaaaaaagtaaaggttggagatcacttaaaggaaactttgggagtaaattctgtccatgatggtggtttctcggatccactggagttgaggctttctctaagcctaggagtggccanaggggaaaaaggaagataaacagagaagcaggtgtgacaagaaaactaataccttctct

SEQ ID NO: 15884 - DNA, 574 bp, Gossypium hirsutum
  unsure (1)..(574): unsure at all n locations; Clone ID: LIB3829-032-Q6-K6-B7
cggncgcgtggggttatgcttgctgagggaaaaccagatttccatcaacggcaagcctatctaccactttgttggaacctcgacctttagccaatatactgtcgtccatgttggccaggttgccaagatcagtccaaccgcccctcttgataaagtctgtcccattagctgtgggatatgtacaggttttggggccactgtgaatgttgctaaacccaaaagggtcaaactgttgcagtttttggactgggtgccgttggtcttgccgccgctgaaggtgcaagggtttgtggggcttctcggatcatcgctgttgatgtgaaccccagaagatttgaagaagctaagaggtttgggattacagaatttgtgaatccaaaagactacgataagccagttcaagaggtgattgtggagatgaccggcggaggagtggatcgcagtgtggagtgtacagggagcgtccaagccatgatttccgcttttgaatgcgtccatgatggttggggtgtttgtgtgctggtgggtgtgccaaagaaagagatgcattcaaaactcatccaatgaatctact

SEQ ID NO: 15885 - DNA, 593 bp, Gossypium hirsutum
  unsure (1)..(593): unsure at all n locations; Clone ID: LIB3829-032-Q6-K6-B8
cagnaccatcttgtaatgctgctgttggcaaagaaatgatcaataaattggcaacttcagaagaaaaagaaaatattctcgttacctacttaggtcttatgttngaagaacaacaggaagaccaagtggtgtcctgctccggggtgtgaatatgctgttgattttaccgttggcagtggaaattttgatgtctcctgcaactgcgcatttagcttttgttggaattgtactgaagaagctcatcgccctgttgactgcgagactgtggcaaagtggattttgaagaatagtgcagagtcagaaaacatgaactggatactagctaactccaagccttgccccaaatgcaagcggccaattgaaaagaaccaagggtgtatgcacatgacatgtacaccgccttgtaaatttgagttttgctggttatgccttggtgcatgggcagaacatggtgagagaactggtggtttctatgcttgtaatcgttatgaagctgctaagcaagagggtgtgtatgatgaggctgaaagaaggcgagaaatggcaaagaactccttggagaaatacacccattattatgaacgttgggcaag

SEQ ID NO: 15886 - DNA, 583 bp, Gossypium hirsutum
  unsure (1)..(583): unsure at all n locations; Clone ID: LIB3829-032-Q6-K6-C10
cttcatatatcttttttagttccgacaaanaaacgaaaaaatagaagaaatacaatcgttttctttttgaagtcgggttttagtttttggggagaaaaaatgttgggagtatttagcagtgcgatagtgtctccgccggacgagctggtggcggccggttgccgaactccatcacctaagataacggcggatgctctggtgaaacggttccttgagacgaactcctccggcgtgtccatgcagatcggagaccatgtccaattcgcttattctcaccataaagagtctcctttacggcccagatcatttgctgtgaaagatgaaatcttctgcttgtttgagggagcccttgataacttggggagtttaaagcagcaatatggtctggcaaagtcggcaaatgaagtgattttggtcattgaagcttacaaggcccttcgtgaccgagcaccttatcctccaaaccatgtggttggccatctaattgggagctttgctttcattgtctttgacaaatccacctccactttgtttgtggcttctgatcaatttgggaaggttcctctctattgggcgaatcacc

SEQ ID NO: 15887 - DNA, 578 bp, Gossypium hirsutum
  unsure (1)..(578): unsure at all n locations; Clone ID: LIB3829-032-Q6-K6-C11
ctccattgagnacgataanaatcgatggagctcttaggttgggcaaaagagaggaagactggtcattaatttagaagaagatgaacaacctaagaaaaaaaacgactaggtagtcctgctactcagtggatttcggttttcaatgcacgttgtcctatgaagcagagatatcactacaatgtagcagattcaaggttgcgccagcatgtagaaaagggtaatgaagatggattatttattagttgtgtggcatcggctgctaacctctgggccttgatcatggatgcgggaactggtttctcgtcccaggtttatgaattgtcaaccgtctttttgcacaaggattggattatggagcagtgggaaaagaactactatattagttcaatagctggagcaactaatggaagttccttggttgttatgtcaaaagggactccttacactcaacagtcatacaagttgagcgaatcttttcccttcaaatggataaataagaagtggaaagaaggctttcatgtaacctcaatgacaactgccgggagttgctggggtgtggtaatgtcaaggaactctgg

SEQ ID NO: 15888 - DNA, 580 bp, Gossypium hirsutum
  Clone ID: LIB3829-032-Q6-K6-C12
gcagaatctgatttcaaaaccaaaattaaaggcaaatatcaagagatttcgaagaaaaacagaaaagaggcggaggaacatagatgccaagcgccggaaggtcaccgtctttgtgttaataactgtggtttcttaggaagtccggcgacgatgaatctttgttctaaatgttacagagatttccgacttaaagaacaacaacaagcttcttcggctaaatcgtctatctctacctctccttcatcttcgtcaacggcagtcgaatctgtttctcaggtacctctcctgactctccctgaagtcaaaggagttccgctggttgtttcggctgtcgcgatctctccggtggcggaacagaaaccacaacagcaacagcaacagcaacagcaacaacaacaacaacaacagcaaccgactcggtgcactgtttgcaagaaacgggtcgggttgaccggattcaagtgcaagtgcgggattacgttttgcgggtcacacaggtacccggaaaatcatggatgcacgttcgatttcaagaagattgggcgagagaagattgcacgtgccaatcccgtggtcaaag

SEQ ID NO: 15889 - DNA, 582 bp, Gossypium hirsutum
  unsure (1)..(582): unsure at all n locations; Clone ID: LIB3829-032-Q6-K6-C7
ccccgcgtccggnaagaaaaaccttaaactctcaagcagccgcagctagaaagggttattgaagtaagaaatttagcaatgtctccagctaaagttgacagcaagaaaaagccgatccgaaggctcaagcagtgaaggctgctaaggctgtgaaatcgggtgtgacatttaagaagaagtccaagaagatcaggacaaaagttacctttcatcggccaaggactttgaagaaggaccgtaaccctaagtatcctcgcatcagtgcaacaccaagaaataagttggatcaatatcaaattctcaagtatcctttaactactgagtctgcaatgaagaaaatcgaggacaacaacaccttggttttcattgttgacatccgtgctgacaagaagaagattaaagatgctgtgaagaagatgtgcgacattcagacaaagaaagtgaatacgttgatcaggcctgatggaaccaagaaggcgtatgttaggttgactccggattatgatgctttggatgtggcaaacaagattggaattatntaagcagatcaaccaatgtcttccttgatttcaacagttttgt

SEQ ID NO: 15890 - DNA, 577 bp, Gossypium hirsutum
  unsure (1)..(577): unsure at all n locations; Clone ID: LIB3829-032-Q6-K6-C8
gcanacgcactattgccttccagctgccatctggaggtggatgaccccaatcaagaagaaccaaccttcagcacacgacattttcgtgggtaactgggaaaccaaccaaaaatgacacagaggaaaaacggggtcctacttttggctccaccatgaacgttctctacggagattacacttgcgggcaaggcgatatcgatcccatgaacatcatcatctcccattaccttcattaccttgacttactaggtgttgggcgagaggaagcagggccacacgaggagctaagctgtgccgagcagaaagcattcaacccaaccccagctccacctgctgccagtgcttcctgatctttggttcagccaatttcattgttaaaatgcagttgtcaatgaagggtaatttaataagagagctgggcaattaggttgttgtaaaatcatggtctatgtcggtgtgagaaaagggcccatcaatttcatgatattatatatagttgtatacgtttgatttgctgctgttaggtggtctttataatttgcttttttgtgtgtgtgtagattttgatatatttgat

SEQ ID NO: 15891 - DNA, 577 bp, Gossypium hirsutum
  Clone ID: LIB3829-032-Q6-K6-C9
attttattctgttcgaaattgctttgtgttgtttaatccaaaggctgaatctacagacgcaacgaaatcatcttcggcggcggcggcggcggcgggtgggacggatgcggcggtccacatcgtttacaccgagaggcctcaggatgagcagcctgaagcctaccatatccggaccctctccaacgtcctcggcagcgaagaagctgctaaggaagccctgatctacagttacaagacggctgccagtggcttctccgccaagcttactccccaacaggttgccgaaatatcaaaacaacttggtgttcttcaagttgtcccgagcaggacactccagctacattctggaccaggcaagctgcactaaggctcaagaaactcttttaccctactaaaaacaaaatcctatggaacaatagtctcattgtataaatatgtttgacacactctgtgctatggggtgtgctacattatactatttgaatctacgttacatagacttatttgcttatagatataaatatgatgggtttaagataataacagggtactgaatatatcagtacaattttttcac

SEQ ID NO: 15892 - DNA, 584 bp, Gossypium hirsutum
  unsure (1)..(584): unsure at all n locations; Clone ID: LIB3829-032-Q6-K6-D10
caactttcagcggnaacagccgcttcctccacatggctagagggttgaagaacacttgaagaggctcaatgcccccaggcattggatgctcgacaagcttggtggtgcattcgcgcccaagccatcgtctggaccccacaagtcgagggaatgtttgccacttattcttattctgcgaaacagactgaagtatgctttgacatacagagaagtgattgctattcttatgcaaaggcatgttatggtagatgggaaggttaggactgataagacctaccctgcaggttttatggatgttgtgtcaattcccaagacaaatgaggacttccgtctcctttatgacactaaaggtcgtttccgccttcatgccatcactggtgatgagactaagtttaagctctgcaaagttaggtctgtccaatttggccagaagggtattccatacctgaatacctacgatggacgcacaatccgttacccagaccctttgatcaaagccaacgacaccatcaagcttgactagagagagcaacaaaattgttgatttcatcaagtttgatgttgggaatgttgtcatggtcact

SEQ ID NO: 15893 - DNA, 593 bp, Gossypium hirsutum
  Clone ID: LIB3829-032-Q6-K6-D11
cataatacctttttttctagtttatatatctctgctcataaatcacaatacacagacacaattcttaagaaagaggagcatagggggggttggttgtttttgtttttgtcttgtgaccaatcttttaaatgaggtgtaagaaacatattgccgacttgagtagcggcgttggcttgtgtgccacttgtctccgggagcgtcttctggagctcatcgccgctcaggcgcaggctcaggcgcaagcccaacaggctcaattagcgcgctttgccatcgaagatggtctgaaacatgaccctccgccgctgattttccctcggtctgtttctccttatgtcagtcggcggaaatctgatgataatagtgccacgtggatccacaatcaacggttctacagcactcctcaggtgggcccaacttacagcaccacatccacctcctattttgaagccaccagatcgttcaaaaagaagaacaggttctcgcttttttcgaatctgctcaggtcgagatccgagaagttcaattccgatcctagggttcattttcatcgggactcgtgcgacgagccttccacatcatcggcatccccg

SEQ ID NO: 15894 - DNA, 582 bp, Gossypium hirsutum
  Clone ID: LIB3829-032-Q6-K6-D12
attaatctgtttgggcgtgttccaaaaaatctgataacactaagttttacgaagtacttggggttcccaaaagtgcaagtcaggatgaattaaagaaggcttataagaaagctgcaattaagaatcatccggataaaggtggagaccccgagaagtttaaggaactggctcatgcttatgaagtacttagtgacccagagaagagagaaatatatgatcaatatggtgaagatgctcttaaagagggaatgggaggaggcggttcttctcacaacccatttgacatatttgagtcatttttcggtgggggagccttcggaggcggtggtagctcgagaggaagaaggcagaagcgaggtgaagatgtagtgcatgctcttaaagtttctctggaagaattgtacaatgggacgacaaaaaagctctctctttccaggaacgcaatatgcagtaaatgtaaagggaaaggttcaaagagtggagcctcctctagatgctatggttgccagggcacaggaatgaaaattacaacacggcagattggactgggcatgatccaacagatgcagcatgtttgtcctg

SEQ ID NO: 15895 - DNA, 606 bp, Gossypium hirsutum
  unsure (1)..(606): unsure at all n locations; Clone ID: LIB3829-032-Q6-K6-D7
ccgtccgggcaaatggctgaaaatcatcagggcaagagtcctcgtctactgctccaaataccggnaaaagagaaatcgtctggcgagaaagacagggaagctatgcaggttgatggtcctccggagaagaaaaccgagcctgagccatcatttgagattttgaccaacccagcaagagtggttccagctcaagagaagttcatcaagtttttagatggtcggtacgtgcccgtaaaggcggcaccgtccgggtttattcttctcaaggacaattgccctaatgaaccagaggagctttctctaacagatgccccagcaactacatctccagccggtggatcagcagctggacaacaacagagttcttcattggctatggcagttgacgatgaacctcagccacctcaaccttttgagtacacatcctgattctgctggacatgttttgttaaacctgatatttctttgtaacttctttttactgagtgagtacatgttaattcaacgatgttttcgtagatttgtcagttctggctcaatctttagaaactaacatgatcgaatttcatttaacaatcataaaaaaaatgagttaaaaaatctgaa

SEQ ID NO: 15896 - DNA, 595 bp, Gossypium hirsutum
  Clone ID: LIB3829-032-Q6-K6-D8
cggccgcgtgggcttttggagagaaagaacggccagtgctatcaatttttcatcttcgccgcctttgtctgatgggaattcttttatgtcttcattaacaggggacactgatagcatgcatccatctttgtcttctggttttcaattcactagtcctttccatatcccctgttctggtaaacctcagttttcttcctctttgaagagaaagtgtaattccaaggacgatgctgctctcaagtgtggatcttcctctagccggtgccactgctccaaaaaaaggaaatcaagagtgaagagagtcgttagagttccagctattagcagcaagatggctgatattcctcctgatgactattcctggagaaagtatggccaaaaaccaatcaaaggttctcctcatccaaggggctattataagtgtagcagcgtaagaggctgccctgcaaggaaacatgtagagcgagctatggacgacccaatgatgctgattgtaacctatgaaggagatcacaatcatagccacatctcggattccccagcacctttggtccttgagtcttcttagtcccgtcttgatccatcggacgcaccc

SEQ ID NO: 15897 - DNA, 473 bp, Gossypium hirsutum
  Clone ID: LIB3829-032-Q6-K6-D9
ctggtatgtatgggaagctgaaactgtactgaaagcggatatgtctggaacacagcatggtgataaatggctgcttacaagaaatactcgaatgaaccggatgaatatactgatcgtgatgatgaccatcaagtattgacaatatactggtatacaactggtatagcatgtataaatacacattatacagattatatggtaatgcagaaagcacgatctgtactgctcaacacgatgtgaggagtccatgggggttagcaccgatcatactaaatttgggattacttgctgatataaggccatgatacagatgaggggtaacggacagagaaagatcacaatatttccatgctgtgtatacaactctgatgtaccttaccaaaaacctttgtgtttaaccaagcacacctacgaagaacacactgttcaagcagcaagcaatgatcaaagaacatactaactgtgcacgatct

SEQ ID NO: 15898 - DNA, 575 bp, Gossypium hirsutum
  Clone ID: LIB3829-032-Q6-K6-E10
attcttccttttttttcttttcggttttcggctactgagtcaccaaacgagttaaggaaaagagagacgagtttcaccaaaccatggggtcgatccccaatcctggcgagttgaccgagttaacccatccgagtttcgatgagttccagcgtcaaacgtctctgatgaccagctgtactctcctctggaaagaactgtcggatcacataaattcacttgagcagaacctgatgaagcagtcggagaccttgaaacgcaaaatcgaggcactggactcggagaccaaggcttcactcgactcactcaagaagcgggaactcagtatcgaggacagtgtcaagatcgcactcagccgagtcgagttcaacaccaaagctgccatgaggacccttggagacgacgttgaagacaatccggacggtgaggtcgacgacggagacggacttttgcaacacttgaaatcaacgtgcttgaaaatggaagctaaagagttctggagcttcgtgatcggaaaaaaaaaagaaatcgatttgttaagagagaaaatccctgcagctttatcggaatgcatcgat

SEQ ID NO: 15899 - DNA, 614 bp, Gossypium hirsutum
  Clone ID: LIB3829-032-Q6-K6-E11
gggacacctgggtgccaaacgcttcttttctttgcttgtgctactgcttacatatctcagggtcttcattccgcacaggaatgatgcaacacctaacgactggatattttacttcgtacttagaataggtctgtacctacagagatgtaagaacgctgatcaaggagagcaagcataaatgtacatgtatcacagcgacgacgacaaacaatgttttatcttgcattgagaaccattatacatggatgggccttgctccatgtaatgctggactgtctttatctgcacataaaggaacttgatggaaatgtactctatccggaacatgctgctgaggaatttaatgtccattgttgccatggaacattctgtttgaagcgtaatgaactgtggctgggccttgggctgatattctcgatatggatgttttgatgggctgcgtaaacgtggttatgcactatctttgctctccctactggatgatacaacggttgatcgagcataactaatgatgtggtggggtatctttccgaccacaatgctacccttttatgagttgcttgacaggatatgccgtcgtgtgagattgaaaccgctggtgcacggtggcctac

SEQ ID NO: 15900 - DNA, 572 bp, Gossypium hirsutum
  Clone ID: LIB3829-032-Q6-K6-E12
gcgactctgcaccaatgaactgttttgaggtctccttcccctgaagatctggtctctgtgctgcaagttgtggtcacactggcctttgggtctgatactgtagctcagaagatgctgtgtaatgatattatgaaatcattagagatactgtttggccataaaaacccagaggtgcaaaggcttgctttgctatctgttgggaatttggccttttgccgagagaattataacattcttgtcacttctgaaaacttgagggaacttctcatgcggctgacggctacacccgagccacgagtaaataaagctgcagctcgtgctttggcaattcttggagaaaatgaaagcttgcgccgtgctattaaagggagacaggtaccgaaaacaggcatacgcatactttcgttggacggaggtggcatgaaaggtcttgcaactgtgcagatccttcaagaaattgaaaggggaacgggaaagcgaatgcatgagctatttgaccttatatgtgggacatcaacgggtggcattttcgcttctgcgcttggtattaaattgatgagctcagaccaatt

SEQ ID NO: 15901 - DNA, 570 bp, Gossypium hirsutum
  unsure (1)..(570): unsure at all n locations; Clone ID: LIB3829-032-Q6-K6-E7
tgnaaagnaccgctgtctttttgntatatcagtcgaggttttgaatttttagatggcgatactatacgcgctggttgcgcgtggatcggtggtgctggcggagtttacggcggcgtctacgaacgctagcgcgattgccaggcagattctagagaactacctggagaaaacgactctcacgtttcgtattcacaagatcggtacatcttccacgtcaaacgcaccgatggactcaccgttctttgtatggctgacgaaagtgccgggaggcgcattccttttgcatttcttgaagacattcatcagagatttgtgaggacttatggccgagctgtcttttcagcccttccttatggcatgaatgatgaattttcaagggttttgagtcaacaaatggaatactactcgagtgaccctaatgctgacaggataaatcgactaaaaggtgaaatgagtcaggtgagaaacgtaatgatagagaatattgataaagttttggagaggggtgatcggttagaattgctggttgacaaaactgccaacatgcaaggaaatacctttcgcttccga

SEQ ID NO: 15902 - DNA, 594 bp, Gossypium hirsutum
  Clone ID: LIB3829-032-Q6-K6-E8
cccacgcgtccgcgattttctagcattttataagttcttaatccggatagttgcttcatagcattttggtgggaaagacaccacactaaaccctagcgtggactcttccacataaaaaaagcctcctctgtattaagataaaactctctttcatcctgcagtaacaagcttgtaggatgtttttttaagtatggggaaagcctcccacacctgaatatccttctgtcacatattaacctttcagtcaacaactgctgactctgccaccccaaaccctctttgacgggtcctgcagttgtagatgggacactttatgttgtctatgagatttttggaaatttaatgatgtgccagaaggatattagggcataggtggctatttggaggcttccccatacatagaacaccaccaccctacaagcttgttgctgttggaaagaacttttatctcgtaaggatggggggggggtgtagcagagtaatagttgatgttagcactgcaggcaatatgaaagggatgatggcgagtgcttatgtaccagcactcactgcaaatgatgaggttattataagctgtaaacatttcactgcaaa

SEQ ID NO: 15903 - DNA, 578 bp, Gossypium hirsutum
  Clone ID: LIB3829-032-Q6-K6-E9
cagcagtctcggcggcggcagttctccccaggtctagtttctaaacaaccatcaaacagaaatgaagttcaatattgcaaatccgactactggctgccagaagaagctggaaattgacgatgaccagaaactccgagccttctttgacaagaggatctcccaagaagtcagtggtgatgcccttggcgaggagtttaagggctatgtgttcaagataatgggaggctgtgacaagcaaggttttccaatgaagcaaggagttctgactccaggccgtgttcgtcttttgcttcacagaggtactccctgcttccgtgggtatggtaggagaaatggagagcgaaggaggaagtcagttcgcggatgcattgttagtcaagatctttcagttctgaacttggttattgttaagaagggtgaaaatgatcttcctggattgaccgacactgagaagccaagaatgaggggtccaaagagagcttcgaaaatccggaagttgttcaacctctctaaggaagatgatgttcggaaatatgttaatacatatcgccgaacctttacaaccaaatctggtaaaa

SEQ ID NO: 15904 - DNA, 570 bp, Gossypium hirsutum
  Clone ID: LIB3829-032-Q6-K6-F10
tcttacctatctttcttgtttcagttttcatcctggcccagtctctcagtgacggagaggcaggaaaagtggaaggggcttttggcggcgaaaacaccgcagctaacaaggacaaggacaaggataaggacaagaagcgtccggtttctcgttcatctcgtgccggaattcagttcccagtgggtcgtatccaccgtcatctcaagtctagggcatctgcaaatgggagagttggggccacagccgccgtttacttggcctctattcttgaatacctgacagctgaggttcttgagttggctggaaacgcaagcaaggatctgaaagtgaaaagaatcaccccaaggcatctgcagctggctattaggggggatgaagagcttgataccctcatcaagggtaccattgctggaggtggtgtcatccctcacattcacaagtctctaatcaacaaaactaccaaggagtagtagcaatgtctgattttaaactagatattgactgttgtgtactttttatctgttatgtcagtgtgttatttgtaggctttgttttatctgtctagaacat

SEQ ID NO: 15905 - DNA, 309 bp, Gossypium hirsutum
  unsure (1)..(309): unsure at all n locations; Clone ID: LIB3829-032-Q6-K6-F11
anaaatcaatcttgccctcatctttggtgttctgaacccctcaaagagggcaagaattgaattactgctcaagcagcagaaacttactaagaatgatatcaagaatatacttcaggaatatcatgacaatatcggtgacctagatggagccgaagagaaggaacaagcacaaacaaggatccagaagatcatttcatccttctgattgtcatctgctgattttgtaccatcatatcttttgaaggatgccatgtgagtttagcattgtgaattttttgagctaaaattaatggtaatgcttatacaatt

SEQ ID NO: 15906 - DNA, 113 bp, Gossypium hirsutum
  Clone ID: LIB3829-032-Q6-K6-F12
tatgatccgtctctgtaagtgggaatctgtgaaatttcttcgtaatttctgctgaaaagtattgtaaatcaaatccgtcttccactttttgttcggaatgttaatgagatccg

SEQ ID NO: 15907 - DNA, 589 bp, Gossypium hirsutum
  unsure (1)..(589): unsure at all n locations; Clone ID: LIB3829-032-Q6-K6-F7
ggcagctcctttccggaaccgagacgcaggagctcagcagccatgggggcttacaagtacgtgtcagagctatggaggaagaagcaatccgatgttatgaggttcttgcagagagtgaggtgttgggagtaccgtcaacacccttccattgtgcgagttaaccacccaactcgtcctgacaaggctcgtcgcttgggatacaaagccaagcagggttatgttgtctatcgtgtccgtgtgagacgaggtggaaggaagagaccagtacctaagggtattgtgtatgggaaacccacaaaccagggtgtcactcagctgaaatttcagcgcagcaagcgatcagttgcagaggaacgagctggtcgaaagcttggaggccttagggttgtaaactcatattggatcaacgaggattcaacatacaaatacttcgaggtcatcttggttgatactgcccacaatgctatccgcaatgacccacgaatcaactggatctgtaatccagtgcnacaagcacagggaactccgcggactcacctctgctggaaagaaatataggggtcttcgtggcaagggacacttgcaccac

SEQ ID NO: 15908 - DNA, 573 bp, Gossypium hirsutum
  unsure (1)..(573): unsure at all n locations; Clone ID: LIB3829-032-Q6-K6-F8
acagaacatctaacttcctggnactccgcagttccttctttgtctgcttcctgaaggaaaactctgatctttatgggccatggaagcggaagaatctttctgagtatggcatcgtgactcagtgtatggcaccagctagggtgaacgatcaataccttacaaatcttcttctgaagatcaatgctaagcttggaggtcttaattcaatgctaactattgagcaaacaccttcaatccctatgatttcaaaggttccaactatcatccttggaatggatgtatctcatggttctcctgggcagtctgatgtgccttcaatagctgcggtggttagctccaggcaatggccattgatttcccgctatagggcatcagtccgtacacagtctccgaagcttgaaatgatagattctcttttcaaaccagtttctgacaaaggggatgagggtatcatgagggaggctctcttagacttttatacaagttcagggaagaggaagcctgatcagatcattattttcagggatggggttagcgagtctcagttcaatcaagttttgaacaaagaacttg

SEQ ID NO: 15909 - DNA, 584 bp, Gossypium hirsutum
  unsure (1)..(584): unsure at all n locations; Clone ID: LIB3829-032-Q6-K6-F9
cacgccgtccgtnaaaacccttaattccaaaattcccccgnatttgacttagatggatcaatacgaagagcaagagcacgaggtgtacggaggggagatccctgacgaggaaggagagatggatgcggagttcgatatgactgctggagctgaggattaccaaggcaacgaccaaggccttcaacaagatcctagttcctccaaagacttgngaagaacatgaaaaagaggcttagggaaatcgaggaagaggcgggagctttacgtgaaatgcaggctaaagtcgagaaggagatgggcgctgtccaagattcctcaagtgcttctgcaagtcaagctgaaaaggaggaagtggattcccgctcgatttatgttggtaatgtagactatgcatgtacacctgaggaagtacaacagcattttcaatcctgtggaacagtgaacagagttacaattttgaccgataagtttggtcaacctaaaggatttgcttacgttgaatttgttgaaattgatgctgtccaaaatgctctactgttaaatgaatcagaattgcatggtcgccagttgaaggtctcggctaa

SEQ ID NO: 15910 - DNA, 590 bp, Gossypium hirsutum
  unsure (1)..(590): unsure at all n locations; Clone ID: LIB3829-032-Q6-K6-G10
ctttggtataacagttgccggttatccagnagctcaccctgntgctattggaagtaatggtgtagcaacaccggaagcttatcagagtgatcttgcttacttgaagaagaagttgatgcgggagctgatctgattgttactcaactgttttatgatactgatatctttctcaaatttgtcaatgattgtcgccaaattggaattacatgtcccatcgtgcctggtattatgcccattaataactacaagggtttcgtgcgaatgactggcttttgcaaaactaatataccggatgaggtcactgctgccttagagcctatcaaggacaatgatgaagcagtcaaatcctatggaatccacctcggaacagaaatgtgccgcaagattttagctcatgggattaagacgttgcacctttatacattaaacatggagaaatctgcattagctatactaatgaaccttggactgattgaagagtccaaaatttctaggtctttaccttggagacgccctgcaaatgtcttccgtgttaaggaaagatgttcgcccaatattttgggctaaccgtccaaagagttacttatcta

SEQ ID NO: 15911 - DNA, 587 bp, Gossypium hirsutum
  Clone ID: LIB3829-032-Q6-K6-G11
ttttaatatattttaatatttacaacatggtattagagtagtgtgaaattttcgtaaagaaattttatcatttaagtgtttaattcggtaaaaagaactaaatcatataaagcataaaaattgtgttctataagataaaggtatttaatagctatagaacattagagtatgagtccttaagttgtaaatagaccattaatttataatggacaagtttggacatcattaatgtgactaagtaaggttatataagtaatttaataattaaataattaaaataggtaaaacaaaacaaaattcatttgttcatcttcttttagccgaaattctaaggaagaaacttcgccatttttaagcttcaacattcggccaactcttggtattgcatatcaagaaagaaagaaatcgaagttagatcgaggaaagttgaaagttttagagtaatcgatccgatttgccaactccgaatacgaggtaagttcgtaagtaataaaatgtttttgaaattaaatataatgtttttaccttgctgaaaatttaattgtacatggttataaattgtcgatcttgaattgtttatgaatata

SEQ ID NO: 15912 - DNA, 572 bp, Gossypium hirsutum
  unsure (1)..(572): unsure at all n locations; Clone ID: LIB3829-032-Q6-K6-G12
naatttacatctganaggctactctgggaaagtgaaacaccgcaacttagttccccttctaggtttctgtgttgcaaaaaaggagaggcttatagtttacagatacatggcaaatggcactctcaatgataatttgcatcctgtagatgatgctaacaaggctatggagtggtccataaggcttaaaatcggtataggggctgccaaaggatttgcatggctccaccacaactgcaatcctcgtatacttcatcgaaatataagctctaagtgcatcttattagatgcagattttgagcccaaaatatccgattttggtctagctaggcttatgaacccaattgatacacatctgagcacctttgtgaatggcgagtttggggatttaggttatgttgcccctgaatatgccagaactctagtggccactccaaaaggagatgtctacagctttggagttgtccttctcgagttggtgactggtgagaaacctacccacgtatccaaagctcctgagagcttcaagggaagtctggtcgaatggatcacgcagctatcaaatgatgggaaaa

SEQ ID NO: 15913 - DNA, 583 bp, Gossypium hirsutum
  unsure (1)..(583): unsure at all n locations; Clone ID: LIB3829-032-Q6-K6-G7
canaatgagttgaaaaaacgagattttcaaaagaagaaaaaaaaacaactccgcgaaaagaacaccgacgatctttagatctcgccaatcgccgatcaaatgattctccggcgaagaaaacttcaaagaagattgctcagaagagtttaatcgaagcattcatttcgccgaacgaagatgatttacctaatatttctgaagagtccattgatttctcttcaatttctgccgtttcagatactaatttcaactttgaaactactgagagcattgccatcacatcgaatccattactttcaagttcatcagaaactttcatatcatctgaaatcggtccttattcaaagataagcgctgcaaatagggatgaaccaattgacttttcaaagactggtttagcggaagtagagatttttctggatcttctaaaacaagctcgattccaagtattgaattcagctcacgtggagaacaaatccagnaaggttctagatgcattaatcgagttcactattaaggagttttatgctatgcctcaagagatagataagctacaggaacttgtttctagaaatgcttatgt

SEQ ID NO: 15914 - DNA, 582 bp, Gossypium hirsutum
  unsure (1)..(582): unsure at all n locations; Clone ID: LIB3829-032-Q6-K6-G8
gtgncaagtgaatggcaggagggggaactgagaagttcccagctaggctttttgctgtccctcctcgntatccaaggacttgttgagggggtctcagttgaaacttaccaagaggacaataagctttgngaagaagcatgtaaatgcttacaaaaggataaatagattgattggtactgcaagatacagaaacgtgatggacatgaatgctggtcttggaggatttgcagcagctctcgaatcacccaagtcttgggtgatgaatgttgtgcccacaattggcaaggacaccttaggtgtgatctatgagagaggtctaattggaatatatcatgactggtgcgaaggtttctctacgtatccaagaacatatgaccttatgcatgctaatggtgtctttagcttgtatcaagataagtgtagctttgaagacatccttctggaaatggatcgcattttacggcctgaaggagctgtgatattccgggatgatgtcgatgtcctaaacaaggttaggaaaattgctggaggcatgagatgggacaccaagatgaatgatcacgaggatggtccccttgtgcc

SEQ ID NO: 15915 - DNA, 569 bp, Gossypium hirsutum
  unsure (1)..(569): unsure at all n locations; Clone ID: LIB3829-032-Q6-K6-G9
nattcgagtggccggnacagnaagctgatgtattgcgtgaggctgcatttgggtattgtgatctgaagaactagaatctgaggctgcatcgattcgtgatgatgcccgacaaccttgtggtcctgctctcaagaagatgcaggctctgcnttgaaaagtatatataatcctgaatatctctgtttgcagtgcttgtttgtttgtttgcttgtttgtttgcttgttctcattcaattattaatctgaatatatatatctcattcaattattactctgaataatggcaggctagaacatggcgtttacaatctctcccgaatgagagaatccgctacaaagcgatacaaggggttccaaattcccatggattggatgcttgaaactggtattgtaagccaggtaacttaagctttcaaccctcatgttctataacattagacactaattagagatggtgcattatttcaactcattaatatatgcaaataaattgtgacagatcaagctggcatcagtgaaactagcgatgaagtacatgagacggatatcttcagagcttgaagcagttg

SEQ ID NO: 15916 - DNA, 592 bp, Gossypium hirsutum
  unsure (1)..(592): unsure at all n locations; Clone ID: LIB3829-032-Q6-K6-H10
cttagatatggtgcatgctgatggacttctatcccttgagactagtcaatatcgcaggtgcactatgcttgatcttttanacggaaatagacaggttgcttcgtccagagggttgggtaataattcatgataaggctcctcttatcgaatcagctagagctctaactgtgcagttgaagtgggatgccagagtcgtagaaatcgaaagcaacagtgatgagagactcctaatctgtcagaaaccattctttaagagacaagcaacaagctaagaacaatatctggagaagaagccccaaaatatcccagaacttatgatatggtgcatgctgatggacttctatcccttgagactagtcaatatcgcaggtgcactatgcttgatcttttaacggaaatagacaggttgcttcgtccagagggttgggtaataattcatgataaggctcctcttatcgaatcagctagagctctaactgtgcagttgaagtgggatgccagagtcgtagaaatcgaaagcaacagtgatgagagactcctaatctgtcagaaaccattctttaagagacaagcaacaagctaagaacaatat

SEQ ID NO: 15917 - DNA, 569 bp, Gossypium hirsutum
  Clone ID: LIB3829-032-Q6-K6-H11
gctgtgtaaagaacctccctagaaaaagaagacttgcatctaaagccacccaaaaccccagttatccaatcagaaaatatgttgatagagaaccaaaatctttcccacccagtccctgaccatcctgatcccataacttcaaatatgtccaaaatcaatgctaattggaacccacatcctgcaaatattctaacacaagctgggactgggagcagtaatgaaaaattaaagttggaatcaaagcattcagccgagcaactgacttcgacatcggaatgcaatgaggaaaaattggtggcaagtactgtaaacacaactatgtcgaaccaactttctttccctacccagccccagatcccactccatgtgcaaaataatccctggtcgattcagtcacaattggattcatcagtcctccaagctcatcaaatgcttgtatcccaagctgatattagtactttaaacagctttcttcctttctcagacaccgatgagtggacgtcaaatctttcttcttgccaacctctttctggggcgtacaaatcacctggtccgataccaatggttgg

SEQ ID NO: 15918 - DNA, 590 bp, Gossypium hirsutum
  unsure (1)..(590): unsure at all n locations; Clone ID: LIB3829-032-Q6-K6-H7
ctcatctgggttgtcgtttctgtagctgaagaactcttcatggctgaaaagacaggttttgatcatcggaggaactggatacctggngaaagttcattgtggaagccagtgcaaaagagggtcatcccacttttgtttttgtaagggagtccaccgtctccgaccctgttaagggaaaacttgtcgacaacttcaagaacttaggggtccatttgttgttaggggatatgtacgaccatgagagtttggtcaaagcaataaagcaagttgatgtggtgatttcggttgtgggtcaaatgcagttatcagatcaagttaagatcattgctgctattaaagaagctgggaatgtcaagagatttttcccatcggaatttggaatggacgtggacaagaacaatgcggttgagccagcaaaatcgacattcgcaatcaaggctcaaatccgtcatgctgttgaggctgaagggatcccttacacttatgtgcctgctaactgctttgcaggctattttcttcctacattgtcgcagccaggagccacctctcccccaagagacaggtggttattctaggtgatggaaatcctg

SEQ ID NO: 15919 - DNA, 573 bp, Gossypium hirsutum
  Clone ID: LIB3829-032-Q6-K6-H8
ctctcctgaaacttctaatctggtcctcttctcctatcgtaccgagcttgatccatagcatactcaggaactcccctatccaggtaaatttcttctcctctttttaacgtttctgttgctaagatatgtgcaagattatttgcagacctaggtgtatgttgaaatctgatattatcaaatccatatattttctgttgaatgttataaatgtatgcccctaccatcgatctgtcttgaccctttgaattgcatttttgatgattgcgagggaatctccttcaagaatcagaaactgccatcccttcccggttcctatttggactgctctccagcaggttattgcttcagcagcaaaggccgatgagatattagaatgaatctctgaacatgagaagaggatatttcgttccgaatctctggccacaatacccgaagccgaccgattctggcttttatcgtaggcaccatcaaagttgatgttgatgaaactctcctgtgggtacgaccatctctggttctctccgcccaaagtgcacaacagaatattcaactttgataaaggctgagctcctc

SEQ ID NO: 15920 - DNA, 576 bp, Gossypium hirsutum
  unsure (1)..(576): unsure at all n locations; Clone ID: LIB3829-032-Q6-K6-H9
ggttgtgatgcaaagttgctttggntattcacaacttaagagaggagaatcctgagaagttctataatcagtttatgaataaagtgctatatgcaagagaaggtgcaaggagtattatggataggacatttgcagattttccttggcaagttagagtagaggtggatggcgtcgaaatagaggttcctgaggatgctgaaggtgtacttgttgcaaacattggaagctacatgggaggtgtagatctttggcagaatgaggatgagacatatgatgattttgaacctcagtctatgcatgataaaatacttgaggttgtcagcatatctggaacttggcaccttggaaagctgcaggtggggctgtctcgtgctcgaagacttgcacagggacggtcgattaagatacaactctttgctgcattgcctgttcaaattgatggagaaccttggtctcagcagccttgtacattgtccatttcgcatcatggacaggccttcatgttgaagaggacagccgaggaatcgctaggtcatgcagctgccataataactgatgtgctcgagagtgctgaaa

SEQ ID NO: 15921 - DNA, 546 bp, Gossypium hirsutum
  Clone ID: LIB3829-032-Q6-N6-A10
gaaactaaaagagcatcaattgatacacatcacatcaagcttgaatatcagataacaaaagcagcagaagtaggaaaaatgagcagtgataaggcaagggatgtgcttaggaaacataagcagttggtgcgaggcgtgggcgaaccatggcagaaagaggcacggccttttgcaaagcaagcccaaaggcctcatccatgtttaattccccagtaccgggaggaagcatccagtcgaaagagtgtaacaaagtgcctaagatgtactcaaccagcacgatccccatcctggttccagcacagattcttcgcccagcaccaaatggaatcaactcaaagtcgttccctcgtgggtcgattttggcaaatctcccactcagaaacctttcaggggtgaaatccagtgggttgccccacacgtcagggtctcggccaatggcccaaatgttgacactcagcctggtgtttttggggatgtagtagccattgatctcgcaagcctgggtggacactcgaggcaagttcaagggagtagatggatgctttc

SEQ ID NO: 15922 - DNA, 558 bp, Gossypium hirsutum
  Clone ID: LIB3829-032-Q6-N6-A11
attgtggtgagacatctccaatagcttcctcacctgccactcgaagctcagattcgaaaccagaactagtcaactgtttagctaatgcctcccccaattccttttgccaattgggtacagccttggcttcggaaacaggccacaccattgccgtcgccgttttaagatcgacggtcgcggaagagacttggggttgactttctagtattttcttcacactcgaagcacacccgccgcacatcattcccccaacattaagaatgataacatcgggagacaaggcagagagatcgtcaaccactccagctcccaatttcgccttcgaatcacctccacccgttccttccccgccgccgccgccaccgccgccgctactcccatcatttccaccaaatccgccgccggtaccagaagagacgcactccaaacggcggtgtaggcgtttgggaatggaggagatagtccttagaggaaaagaataagaaaggacggcgacagggccaaggagtggagactgagagaaagagaacaaagtggatttagggtttaggggtttag

SEQ ID NO: 15923 - DNA, 570 bp, Gossypium hirsutum
  Clone ID: LIB3829-032-Q6-N6-A12
ggtgaatcaagactcggagattattaaagctcaatagtagaaaccagagaaaataacatcttagttatggagggactcataagacatgtacaaagaagattgactgcactcaccaacccatcagcattcttctaactctatctacaatctgatttctagctaacgtactcaataattggaatccgcagttctcatccaaaaggaatctgtagacttcccattctcgatctgaactcgaatatcttccaatttcagccgaaaatatgcaaattccaagagcctttaaagctagtgtaacatcatagaaaactcttggtctcccctttccagataactcaactggattagcaaccagaagttctgtatcaggcccccggtttgcgatgatgacacgcaatgggtgaagcatttccaccttcaaacgagagcatagcccattttgcttctcaggatccacaaactttttgccatccttttgctgaataaagaggtccaaatcacggtagcctttggaatttggtgagaaccggccaaaagctatcttgatatttgcagtctttcaaagttctc

SEQ ID NO: 15924 - DNA, 558 bp, Gossypium hirsutum
  Clone ID: LIB3829-032-Q6-N6-A7
aaaacctaaaccttgatcataatatttcataaagcaccaaaagtgtagcttacgtacaattacaacatcaacaagtacaatacaaatctcaattagaaattggtgccaatatactgcaacaattggagtaccgaatcattggctgtcagcctccaaaccaatttattagccaaactgtgtagtatcagaagcaagttaatgatagccaaagaaaaagaataacatagggaatgaagagaaaaggaactatgaagcagcagcagaacgatcagattctatcatagatttgatgtagaattctcctgccttgtaggatgatctgaccatgggaccagatgccacatatcgaaatcccatttccatgccaagggctcgatattttccaaaagcttcaggtgtaatatattctgatacgggcatgtgacgctttgatggtctcatgtactgaccgaatgtcattacatcaacacctgctgctctgaccttctccattgttttcacaacttgatcaggcgttttctccacatcctaacataatcgaagtcttggtaagtgttc

SEQ ID NO: 15925 - DNA, 572 bp, Gossypium hirsutum
  Clone ID: LIB3829-032-Q6-N6-A8
tttctttttaggcatcgtgaacctaattcttacagaaacgaaaagtgatcacacatgttgcttcttcgaacaaaaactaattctttttcagaaaataaaaaatcaatcaattgcctatgctactcaaatatgctgtacaacaatttgcctacaaaagagaggttagaggatttacatggaatgtacatagtaagtggaggttgtcaatcatcaaggcgttggatctcacccatcattatacggttgctggtgactttgaaacccagtagagcaggatcaatctgtcttccctttttccctttcttcttgccacttcgtccagcttgtgttgcaccatcagaaggttccaaagaagtgctgttagctgcctcagtcccacgaagaaccggcttctttagaatctcaatgaatgatgcttcagacactgcagcatcattgcaagatgaggtcctcctaaaacggacgtctttcttgctagatgcctgagtttctacactcctcatcgttcctagattcgccaccgtcccctgtcttccttcatcagaagttgcaaggctagcagaattattctg

SEQ ID NO: 15926 - DNA, 571 bp, Gossypium hirsutum
  unsure (1)..(571): unsure at all n locations; Clone ID: LIB3829-032-Q6-N6-A9
aacactaacaatagaagcatcattgtcacttccatgcatgccagaggccttgattaatggtacaagaacagggtactaagaggccctcagttcaagtcccctgttctcaaatgtgcgaggacaatactaaagagagtaaaaggacaaaaatgtaaatcacttccatgcgcaggaagcaaccaaatccctattcatccaaccaaggtacagagccccatctctctcttcaagcctatatctatcgcagtagttctcaagtagggtttttatggtggcattaaccaaggagcttagaggataaggagtgaaccctgccattctgaaccttgacctccacttccccaagagttcatgtcgttcaactctctcagccccctcacaagctatgatgttaacgacatcccttgccaggcattgctgctcaacatcgatccgctctttatgttcccgggnggagagtcacatcaattgattcaaacatggctgtgtaatagtttagtgtctccaggaaccttgcgaagaaggagcagtatttgtgttagattcctgttccacaagggttacaaccttt

SEQ ID NO: 15927 - DNA, 480 bp, Gossypium hirsutum
  Clone ID: LIB3829-032-Q6-N6-B10
accaattgaaaggtcgaatcatatactcagaaaatagttaaaagatcatttgcagttaacagatgttggattacacaatacatttacgttaaaaatctgattaagtttccaacgtgaactagaatattatctaaaagtttttcttccaacataattgagccttgactgtctacttctcaccggtgtgcaccagttctctccaatagccatcttggctctcattttcttgtactccctggatcttaaaactccctcaagaatgtttttatcttcacaaatttcatgtctagaaagagatgcgaggcccggaagtatgtccttttgaaaatcctttagtcttcttcctcttctcaacttgataccaaaatcttttgtctgtccatcacttacttcaaatggcttcgatgttacagaatattcatcagcaccagtttctgcctgttccaaagtcattaactcaaaagaaacaatggaacgctg

SEQ ID NO: 15928 - DNA, 430 bp, Gossypium hirsutum
  Clone ID: LIB3829-032-Q6-N6-B11
cctaccccaaatgtaatgtatatatatatggacaatgaaaagatttatcttccatagggaaacagggtttctttatttatactaaaagccattccaaagaggccgaactgatataaaagcatcatcaaacatatttacattcactagtgcatcaaaacgtaacgataacttcatcatgttatgcttggataccaggagttgcatccgtgtttgagtcatttagtgttggccgagttgcaatcggtggaagattattgggacgcctgtatgccgatggggttgttggggtacccggtgttcttggagttaggtaaggggaaggggtgttcggggttcttggggacaagttgacaaactctagcgcttgttgtctcagttctaggggggaatcagcgacacacacaatccttggcccagcaccggttgaaca

SEQ ID NO: 15929 - DNA, 462 bp, Gossypium hirsutum
  Clone ID: LIB3829-032-Q6-N6-B12
gcaaatcacaacataaacttgacttccacatttacattgcaagctgaagcttacgtaccggggaaatggtaataattcttattctgttatacagggaatcgattttaaaaataacaatccatatggatacctacaagctcaatacacctacacccctttaactaatttctttacatacaaccttctgtgaatgcagcatggcgcatttacctactttgacttacaaggagatttctcataaaaggagggggaaattttgccttggccgttctataaataactttgtgccagataagcatcatagataatgaggatatttcagttgttacctcctcgaatccatcgcgctgaacctgtctttgccaagcctgaataataatcacccacgttcgcaacaaataggggatctctatcttcaactcttaactcgttcacgacactacccgggctatttccctgaac

SEQ ID NO: 15930 - DNA, 467 bp, Gossypium hirsutum
  Clone ID: LIB3829-032-Q6-N6-B8
aaaagcaagttggcaggttatatatatggtaatatgtcgtgtatatgtatgtgtacatatattatatagatatagatatagatatagatatcgatatatacatcaaaagagcacacttgcgttatacagtaggctccaccgacaaatagacttgtatttttcgcacaccaacaatttatggaatgtggaaactagaagggagagcagggttacaagactaattacttgtatcatctacatttctgccggaaccaccagatttagaactcccttttcccctgccccctcttgtcttgctagtcccacccgtatttttcgagctcgttgtcttactgcaggcagctgcagcctgggaatcgacatctgccaggccattctcaagtgctctaaccaaattctcaaagtaattttttgtcacactagttagcccagctaactttgcacgaaagtcatcaaactcctttgat

SEQ ID NO: 15931 - DNA, 426 bp, Gossypium hirsutum
  Clone ID: LIB3829-032-Q6-N6-B9
cagccaaaatttcctacgttaagatttgattctaaataagcattgctttacatatacctactttaaacatttttatccatcaaagatcattttggtcactgtcccaccgaccatttttacattaaaggctgcgctgacgaccttaattcgaaaaccttgcatgcaaccatgcaagtatcattagcaactgtacaaacaacattgtgaaccgaaaggtcgttcatggttgctgcatctccgcctagcttttgctacggttctagcagtaaaacatcactcttttcacattttttttcaaggccgggaacggccgcaccccggattttcctgctgcctttggaccaccaccttttgcttgacctgaaccagcaccccgggggctattattggcttgcatctctgggtctagggagaaccgggctcgga

SEQ ID NO: 15932 - DNA, 548 bp, Gossypium hirsutum
  Clone ID: LIB3829-032-Q6-N6-C10
cccattctacaagtactgggactcagttattcacatgggagactgatccatatgctatgcatttgcagctcctatattcccatggatccatagatttagaaggagaaagcaaaggactactctgtggcagcaacaactgttggcccttccaccttgaatttagcaccccatatctcctcttcttcagcaggcactgcagtgatcttgttcttaggattctcatagcttcttaatcctcctactgctgtggagtagaaacagcctgcataattgaaatatgaagctcctcaattcaagttcacgattccactttaaaaaaacatcagtaaaactgtataaggggaatgcaccttgaggaaaagaagcaagagatttgccacaggcacctttcagcaattcagcattatcagcaaaggccacatatccgtcggcggtgattccccaatagagaggaaccttaccaaattgatcagaagccacaaacaaagtggaggtggatttgtcaaagacaatgaaagcaaagctcccaattagatggccaaccacat

SEQ ID NO: 15933 - DNA, 547 bp, Gossypium hirsutum
  Clone ID: LIB3829-032-Q6-N6-C11
gaatcattatttcttctttatggagcaagttaaactagctatgttactatatgactctttgtttttcttaaaataattgtatctgaaacccgtacccgacacatctcggatatgaatacagaaatataaatatgaccctccaattacatcaaaagtaaaacatactcatgtctggatacatatttgtatccgacacaccccactccacaacacacagaactagcacacagttcgcccatagcaaattgatgctaggtacagattttttgcccatttttcctttacatgggtgctcgggaaggtggatgtgcgcagagtttcctgagtttcatccatcatttttcgtttcggaatgcttagtatgaaggcagcttggtctgcggttgcagccatagatgttattctgtaaccactctcccatcgccgatgtattccttcacttggatacaaaaagtcaagctccacaacctgatcggagaacccagagttccttgacattaccacaccccagcaactcccggcagttgtcattgaggttacatgaaag

SEQ ID NO: 15934 - DNA, 563 bp, Gossypium hirsutum
  unsure (1)..(563): unsure at all n locations; Clone ID: LIB3829-032-Q6-N6-C12
ttttcttttaataaaaatagaagacttattttataagataaaatatttttatccaagcccaatttttaaaggtatggggaccncactgaaacacgtgtcgcaatcttaacgagtttgacatttctatttctctttttttcttttactcattaaaagtcaaagggtcaatcggctttccatcttcttcttctcaaatcctcacgatcttctctgctttgaccacgggattggcacgtgcaatcttctctcgcccaatcttcttgaaatcgaacgtgcatccatgattttccgggtacctgtgtgacccgcaaaacgtaatcccgcacttgcacttgaatccggtcaacccgacccgtttcttgcaaacagtgcaccgagtcggttgctgttgttgtntggtgttggttgctggntgctgtntgctgtntgctgnntggggntttcctgttcccgccaccggnagagatccgcgacagnccgaaacaanccagcggaactccntttgacttcagggnagagtcagggagagggtacctgagaaacagattcgactgccgttgacg

SEQ ID NO: 15935 - DNA, 556 bp, Gossypium hirsutum
  Clone ID: LIB3829-032-Q6-N6-C7
aaaacgaaaagtaaaatccattcattcaggacatcgtgtgtaaaatcctaaaccaaatcccatgcagatttttagtagtaaaaacatagttccttacacatataatgcagacacgaaaataaagagtcctaacatagtcaatcgttctaacaaaactgttgaaatcaaggaagacattggttgatctgcttagataattccaatcttgtttgccacatccaaagcatcataatccggagtcaacctaacatacgccttcttggttccatcaggcctgatcaacgtattcactttctttgtctgaatgtcgcacatcttcttcacagcatctttaatcttcttcttgtcagcacggatgtcaacaatgaaaaccaaggtgttgttgtcctcgattttcttcattgcagactcagtagttaaaggatacttgagaatttgatattgatccaacttatttcttggtgttgcactgatgcgaggatacttagggttacggtccttcttcaaagtccttggccgatgaaaggtaacttttgtcctgatcttcttggacttc

SEQ ID NO: 15936 - DNA, 566 bp, Gossypium hirsutum
  Clone ID: LIB3829-032-Q6-N6-C8
gcaaataattttaggagacaaattgaataaaaatggtggttcaatacatacaattttatatgaatgtcgtggacagcacaacaagcatcaaatatatcaaaatctacacacacacaaaaaagcaaattataaagaccacctaacagcagcaaatcaaacgtatacaactatatataatatcatgaaattgatgggcccttttctcacaccgacatagaccatgattttacaacaacctaattgcccagctctcttattaaattacccttcattgacaactgcattttaacaatgaaattggctgaaccaaagatcaggaagcactggcagcaggtggagctggggttgggttgaatgctttctgctcggcacagcttagctcctcgtgtggccctgcttcctctcgcccaacacctagtaagtcaaggtaatgaaggtaatgggagatgatgatgttcatgggatcgatatcgccttgcccgcaagtgtaatctccgtagagaacgttcatggtggagccaaaagtaggaccccgtttttcctctgtgtcattcttgggtggtttc

SEQ ID NO: 15937 - DNA, 577 bp, Gossypium hirsutum
  Clone ID: LIB3829-032-Q6-N6-C9
gtgaaaaaatgtactgatatattcagtaccctgttattatcttaaacccatcatatttatatctataagcaaataagtctatgtaacgtagattcaaatagtataatgtagcacaccccatagcacagagtgtgtcaaacatatttatacaatgagactattgttccataggattttgtttttagtagggtaaaagagtttcttgagccttagtgcagcttgcctggtccagaatgtagctggagtgtcctgctcgggacaacttgaagaacaccaagttgttttgatatttcggcaacctgttggggagtaagcttggcggagaagccactggcagccgtcttgtaactgtagatcagggcttccttagcagcttcttcgctgccgaggacgttggagagggtccggatatggtaggcttcaggctgctcatcctgaggcctctcggtgtaaacgatgtggaccgccgcatccgtcccacccgccgccgccgccgccgccgaagatgatttcgttgcgtctgtagattcagccattttggattaaacaacacaaagcaattatcgaacagaataaa

SEQ ID NO: 15938 - DNA, 441 bp, Gossypium hirsutum
  Clone ID: LIB3829-032-Q6-N6-D10
aatccaagtaaaacaatagatttcagaaagaactgtaatgtgataaatgatagttaaaatataacataaaccaaatgagtaactaaactaaattcatagaaaaaaaaacattaataaaaagcaaatccgtaaaaccctacagaagctaggacaggaccagccagcattcatccaacaagtctttcgacaaaaaaaaaactctagatatgataggtttaagcagcagcctgagcagcaagcctcttcctcgcttcctcaatgatcgacaacttgatacccttgcccttgggaagcgaaatccatggctttgttcctttaccgattgtgaagacattgcctagacgagttgcaaactcgtgtccagcagcatcttgtacatggattgtctcgaagctacccttatgcttctccctgttcttaatcactccaacacgtgccctg

SEQ ID NO: 15939 - DNA, 451 bp, Gossypium hirsutum
  unsure (1)..(451): unsure at all n locations; Clone ID: LIB3829-032-Q6-N6-D11
ggctaaaccgtagtttaaatcaatttacttgaattatctttcactcacaaccgatgtggtcaaatgtcaacgatttaacgcactcaacggttacgattgactctgccaaaatcagcaagcttcctggaccgattcgcgtgaaatcctgcggcgctcgccagatgcggcttcttcgtcgacggtcgagcttctccgctgaacgacatgtccggtggcaatccgcccttctggttccagtgcgtgttcgggctcggcctcatgagtgggcttaagcaaaacgctaatcccgaaatgttgttcctcgtcccgcccctcggtctcctcgctgccgtcggtgtcattttccatcgcggcgatgcctccggcgaggctccagatggcggntgatcacactcgtctcctgaatccacttcaatcgctggcgacattccccgatctatgattctacatg

SEQ ID NO: 15940 - DNA, 458 bp, Gossypium hirsutum
  Clone ID: LIB3829-032-Q6-N6-D7
gaatgaattcagatttttaactcattttttttatgattgttaaatgaaattcgatcatgttagtttctaaagattgagccagaactgacaaatctacgaaaacatcgttgaattaacatgtactcactcagtaaaaagaagttacaaagaaatatcaggtttaacaaaacatgtccagcagaatcaggatgtgtactcaaaaggttgaggtggctgaggttcatcgtcaactgccatagccaatgaagaactctgttgttgtccagctgctgatccaccggctggagatgtagttgctggggcatctgttagagaaagctcctctggttcattagggcaattgtccttgagaagaaaaacccggacggtgccgcctttacgggcacgtaccgaccatctaaaaacttgatgaacttctcttgagctggaaccactcttgctgggttgggcaaaatctc

SEQ ID NO: 15941 - DNA, 474 bp, Gossypium hirsutum
  Clone ID: LIB3829-032-Q6-N6-D8
ctcgacaagatccaccaccatatttgaataatattatatatgaaatgaacaaaaattctggtaatcgagtataacaactttaataagtagaacgatgaaaagaacccaccccctactagtcctacttaacattgtcttttggcaaaaccaagaatggggaatcctatattgtccttttaaacaactaatattcccactaatcaatctaattgtcttgttggacagttgactatctgaacaaccctacttcagggggctggctcgatttagatgaccattgaaaaggaggggggggggtgcgtccgatggatcaagacgggactaagaagactcaaggaccaaaggtgctggggaatccgagatgtggctatgattgtgatctccttcataggttacaatcagcatcattggggtcgtccatagctcgctctacatgtttccttgcaggggagcctcttacgctggtacacttat

SEQ ID NO: 15942 - DNA, 349 bp, Gossypium hirsutum
  Clone ID: LIB3829-032-Q6-N6-D9
cgatctttttcggtggatgggtggctctgtagaccctatttatatacttcttcttgccggagacaggaattaccaatcgagaaagtggaacaattgtggaaagaacactggttttggaaaagattgtgggagatgaagctgatgacagtatttacaagctagacaaatgataattagggtttgattcgcaacatattttactcttcttctttattgtcttttgcccacaaaagggttatttaaattacctaggcatcgtttctttgtgagacaggatcaagtgagtagatgagaatatgtttatcaagggaaggttagtgaacatgggttatacataaaacccttaaaa

SEQ ID NO: 15943 - DNA, 512 bp, Gossypium hirsutum
  Clone ID: LIB3829-032-Q6-N6-E11
gaataatcatatgtttaacaacagcgaaatacctgcactgtacacagggaacaccatccttacctacatatatcacatcactttatacatacaccattcgcatgaccaaaatcaagaagaacggatatcctgtcttcaccgctaactgaacaatatgacccggaacgcatcgttactacaccaaaaccattgctacccttactaacctcgaacattaacataacttgtatcttgaacaaaaaactgagtagacaagcattctatttgtacaccctctgttttccttttggtcgaggcattttatcgaagcttgtttgcaagattgcattgcttcctgatctcacccttgctaccagagagaggattgttctcatagaggagagtaatggcccttgagaactccttgaagaaatagtcttggctcttggccattttcttaacataaggtctggtcctttgggcgtacgccagatggtgatccacaatcaacaaacccttgttggccagtatgt

SEQ ID NO: 15944 - DNA, 580 bp, Gossypium hirsutum
  Clone ID: LIB3829-032-Q6-N6-E12
atactgctctcatctgattcatcacaaagaggtctcagatgtttttttcttattccctctctcttcatctacgtaatacgatttacaacatttatatcttttacactgtaacaacaaaatacatgattggttgttgagatttatatttataactctctccacttacgcatttttaaatggtgcaacaagtctttcacaagcatccttgaaagtttccgaattgttatcgatgtaatccttcgttgcagcttccaactttgcccaaattgttggatccgtctcatccagctccatgtcacatcgttcatccactggattgaaccggaagtaatggatctcagggtgcataggtaacagcgtccttaaagcttcctctgcatgatctacagagcatgcactctcgatcagcacttgccctgcatctagatatcgccaaccaccttttcgagccttagtaggcaaagagccagatccaattgaaactatacaatcaattttagtatcaggccacagaaagttgtgctttctcgtatgggagaagatagttgggattgttttgccaatagagcaccgtcaagcc

SEQ ID NO: 15945 - DNA, 542 bp, Gossypium hirsutum
  Clone ID: LIB3829-032-Q6-N6-E7
ctaactcttcacattgaataaataaacaataaaatcaactcaattcaactcaacataaacataaacattatatataactaaaaacaaacaaataaaactataagcaagaggaaagggggcaagtaccgaaggagtttgaatctcaagctcttgacctcattttaggcatgaaggtagtgtgatcccatggcaaacgaaagccagcacaacataaataattattaggaggagaattattagagcaaccgtaagtttgacgtttctccaccatactgtgtttctaaaacggcgagtttgctttcggaagcgaaaggtatttccttgcatgttggcagttttgtcaaccagcaattctaaccgatcacccctctccaaaactttatcaatattctctatcattacgtttctcacctgactcatttcaccttttagtcgatttatcctgtcagcattagggtcactcgagtagtattccatttgttgactcaaaacccttgaaaattcatcattcatgccataaggaagggctgaaaagacagctc

SEQ ID NO: 15946 - DNA, 539 bp, Gossypium hirsutum
  unsure (1)..(539): unsure at all n locations; Clone ID: LIB3829-032-Q6-N6-E8
gctaaaaactgaaggtgttgtatagcattagaagatatccaagcccaatcaatgttttcagatggccaaacatttacaagttacaataatctaccatttgcagtgaaatgtttacagcttataataacctcatcatttgcagtgagtgctggtacataagcactcgccatcatccctttcatattgcctgcagtgctaacatcaactattactctgctacacccccccccatccttacgagataaaagttctttccaacagcaacaagcttgtagggtggtggtgttctatgtatggggaagcctccaaatagccacctatgccctaatatccttctggcacatcattaaatttccaaaaatctcatagacaacataaagtgtcccatctacaactgcaggacccgtcaaagagggtttggggtggcagagtcagcagttgttgactgaaaggttaatatgtgacagaaggatattcaggtgtggggaggctttccccatacttaaaaaaacatcctacaagcttgntactgcaggatg

SEQ ID NO: 15947 - DNA, 412 bp, Gossypium hirsutum
  unsure (1)..(412): unsure at all n locations; Clone ID: LIB3829-032-Q6-N6-F10
aaaagtatccaacaaaacatcatcatcatccctaccctaaacaaagatcataagttcaaaggcaagaacctagaatgttactacnacttatataatgaccagatgttctagacagataaaacaaagcctacaaataacacactgacataacagataaaaagtacacaacagtcaatatctagtttaaaatcagacattgctactactccttggtagttttgttgattagagacttgtgaatgtgagggatgacaccacctccagcaatggtacccttgatgagggtatcaagctcttcatcccccctaatagccagctgcagatgccttggggtgattcttttcactttcagatccttgcttgcgtttccagccaactcaagaacctcagctgtcaggtattcaagaataga

SEQ ID NO: 15948 - DNA, 312 bp, Gossypium hirsutum
  Clone ID: LIB3829-032-Q6-N6-F11
aattgtataagcattaccattaattttagctcaaaaaatcacaatgctaaactcacatggcatccttcaaaagatatgatggtacaaaatcagcagatgacaatcagaaggatgaaatgatcttctggatccttgtttgtgcttgttccttctcttcggctccatctaggtcaccgatattgtcatgatattcctgaagtatattcttgatatcattcttagtaagtttctgctgcttgagcagtaattcaattcttgccctcatttgagggtgttcagaacaccaaagatgagggcaagaattgaatttct

SEQ ID NO: 15949 - DNA, 241 bp, Gossypium hirsutum
  Clone ID: LIB3829-032-Q6-N6-F12
aagaactaacacaacctattgggaatggatcttattagttcacttggaaaattcagaacaataaagatggccggccaaatagattgcaaatagtcataatagggagccaaacctataagggaatatcttggataccaaagtaccacaattttattccattttatggcacctcataaatatggatttagaccttttacatgtatatcggggcagatctcaccgtttttcgacgagggctttt

SEQ ID NO: 15950 - DNA, 371 bp, Gossypium hirsutum
  Clone ID: LIB3829-032-Q6-N6-F7
gacaagtcagtctcaaagcattacactaacttttcaataacctcatcgtagagtatttcaagaggtctactaaacatataaatatataatcgtctcaaaattctcacccttacaaaagaaatgatggtaagtagatgaaacaaaaacagcaaatataatccatgggaattaacggtagcggcgaagagagagagtgttgtttctcttccagtttgcccttcttgaaggtcgagccttgtggtgcaagtgtcccttgccacgaagacccctatatttctttccagcagaggtgagtccgcggagttccctgtgcttgtgcactggattacagatccagttgattcgggggtaattgcggatagcattgtggg

SEQ ID NO: 15951 - DNA, 488 bp, Gossypium hirsutum
  Clone ID: LIB3829-032-Q6-N6-F8
aatcaaaagacaaaccattgaccatatttatcaaagtataaaaccaaacaggaaaaagccacaaaagccactgcagaagtgagcttagctagacaaccgttcataagttcagataacatacggaacacctaagagtgttgcaacccaaaagtctaaagacatgaaaaagcagcataaatagtttttggtagccaaaatccaaaagccctatacaaaaacatggttcaacggttttcagcagaagaacatggagctgctgacattatccttcaacctgggaagctgaggtacagaaatggctcccggagcagtcaccccaccatggctcgatgatgtctctgaagcatcctcaaacttcataaattgccccaactgtgaagctgccaaatgagcgtagcaaataggggccacaacagatatggctgtggtgctcctttgatacacgtaggatagagaatgaacaagctcctgcagatcatcagctgaaa

SEQ ID NO: 15952 - DNA, 358 bp, Gossypium hirsutum
  Clone ID: LIB3829-032-Q6-N6-F9
aaccaaaaagactagtttaccattaatgggaagtggaagccaaagtacaaacacatatcacattgtgaccagacacgttgccattgatgtttttttccaactgaagctgtctccctaaacagtttggtcatcactttaaagtttgaaccccaaaaataaaagttgatcccatataaatcctaatctttagaaaactaaagcaacaggaaactgagaaaattaaatcctattttctacaacaagggaatccttagatatatttcagaaaacttggcatttatcactggtgaagcaaagcacatagtcaatcttggattgatggatccatcacactctgcaagctcacaatttgagaaaa

SEQ ID NO: 15953 - DNA, 355 bp, Gossypium hirsutum
  Clone ID: LIB3829-032-Q6-N6-G10
aagtggaacactgcactgcagcataataatattaattctctttatatagtcattattacaaataaagttacaattgaaaattcaaccaggaggagactataataaaggagaaagacaacataaacataaaatcataagcataagtctcatcttcaaagatcttcaaaaacaccaaaaatattaccatccatgtaattgttatctaccaagctcaccaaatagtagctgctctgaatctcttcgagcaaattcttggaaggatcgccgtccgggtacaaggcggaccatgatcgagaccagatttcaaatgcttcgtccttccacaccacaaaactggcaggatccaccacagttg

SEQ ID NO: 15954 - DNA, 573 bp, Gossypium hirsutum
  Clone ID: LIB3829-032-Q6-N6-G12
cagcaagaattatcacattaatcaataaggaaaacagatcccacaattgtgaagtgatcttaattacattatacgtagcatttgattggtgtgaagctaatcatcctacatacatgataatttagggagaaagcctcgaaagattatgtatgatactaatcaatctaaagttttttttttcctcgaggacataggtgaaggattctaatatgaaataacagacacaaagacctaatgtagatgctaaaaaatatacctgatacaattacagtgagtactgaatgtaggaagttgaaatagtaagtaaagcatcatacatgtaacttcaacctttatttaaacatgcacaagagcaaatacttacacatgcactatgctaagatacaatactcaccatgtcccatagctcttcactgaccctcgatgacttctcgagcaacaataagttcctctaaataatcagcatcaccagtatctgaaggcatcaaaatttcatcctcggtggtaaaattgtatcgctccccaatagctcttaaaagctggtatacttcaaacatggtaggcctctccttg

SEQ ID NO: 15955 - DNA, 586 bp, Gossypium hirsutum
  Clone ID: LIB3829-032-Q6-N6-G8
gataaatagaattgtttattgtcattcatcactatgctttcttgtatcttgacataattatttgggcagctacacaaataatgtaaaaaacacaatttcctcccaaaatcacacaggattacaagctaacataattgtgtatattctctacatagtgaataacacaatgtagcaacttaggtatctttttgagggttatgatcggaactctttagtccctctgtctgaaccaacttcatcatcagttcgagattttaacctttgctttttagttttaccttgaactacttgacctgttgatgttggtttattcagcactggatgtactgtttcctttgataccaccaacccagtactgtttaactgcaactagaattttctctggcacaaggggaccatcctcgtgatcattcatcttggtgtcccatctcatgcctccagcaattttcctaaccttgtttaggacatcgacatcatcccggaatatcacagctccttcaggccgtaaaatgcgatccatttccagaaggatgtcttcaaagctacacttatcttgatacaagctaaagacaccattagcatgcat

SEQ ID NO: 15956 - DNA, 579 bp, Gossypium hirsutum
  Clone ID: LIB3829-032-Q6-N6-G9
atatcataggagaaaatacgatttgataagtcttaaaactatttacattaactccctgactcaaggggtcaaggcacaattaccagctaaagtagaacagctgggtttaggtgatacagtaaattcccagcttcaatagctggcattaaatgaattgaatgtaggaggataaatagcagctggctcgttgtattcacaaacatgatgtttcgatctttacaacagaaaaactggtattttcttttgaaaaatcagcttgttgtagtagacctgcaaatgaatttttgctggttttggcattggacattgcatgatcttgctttgtctctcagttcctcgaaagccctcattgtttcgacatcaaatccgccagcaaactgtccatgaacaaaagaaaaatgggttgccttcactatgccgtcttggttcaagttgtaaaaattaatgagaatagctgttacctgatgtacacggaatgcaaatctaacaccttgaacaatcagttcctcttcttcaggcccaccagttccaactgcttcaagcttctgaagatatccgtctcatgtacttcatcgctag

SEQ ID NO: 15957 - DNA, 446 bp, Gossypium hirsutum
  Clone ID: LIB3829-032-Q6-N6-H10
aaacctaagctatacgtttttcacttgcaatggcgcctctgtttcgattaattacaagaccctatccatgccttgcggctttcatttttgtttttcatcaactatctttgctgctttcttctttctttctgttcaaaatgcacaaaatgaatttgaataccaagacttgaaaaattttggggcttcttctccagatattgttcttagcttgttgcttgtctcttaaagaatggtttctgacagattaggagtctctcatcactgttgctttcgatttctacgactctggcatcccacttcaactgcacagttagagctctagctgattcgataagaggagccttatcatgaattattacccaaccctctggacgaagcaacctgtctatttccgttaaaagatcaagcatagtgcacctgcgatattgactagtctcaagggatag

SEQ ID NO: 15958 - DNA, 513 bp, Gossypium hirsutum
  Clone ID: LIB3829-032-Q6-N6-H11
ctaatggaaataaatattatatctcatcactcatcaccatagctcaggttctgattagtacaactatttgatgaaagttcatttcctgctgaaaaagtaatttaatatccgtacatcacatttccatctctacaaaggcttacagagatactacttgaatgccaaactccgccattctcaatctccaaataaacaatggagctttgttgggtaaatcccgaaccacgataataactcagcttggtggattctttaagcatttgcattggaaccatctgagttagagccattgatgccttgcactgtggcagcactgttgagaagcttcattccttcttcactcatctgttgtacttctgtaggggatagaattcggatgcaacgaacacacccgacaaattcctcccaaggatcgtctccaacgagaagaacatcattctcataatccacatacaccaatttccagcctgaacctctgggatcatccagcagacccttgagtccaaacatgca

SEQ ID NO: 15959 - DNA, 374 bp, Gossypium hirsutum
  Clone ID: LIB3829-032-Q6-N6-H7
gggagagacaacgagaaatttatgacataaacacacacgtgcatacacacagaatccccaagctctgtgcacaaatctctcagtgacagtttttgaattattactggtaacagttaaaaaacaacagagatgagatgtgatttatagctttcaaaaaaaaaaagactgaggcctttttacacaggggtgtttttcacttgggggtagagctcaaaatcttcatatccgaaagggggatcgatctcgaaggtggcgcaatcaccattgacaaatattgagagactgatggccaacataatattgattgggattggagactcttggatctgtttgaaaagttgggcctaaagaacatatgttttcttaagggtttt

SEQ ID NO: 15960 - DNA, 423 bp, Gossypium hirsutum
  Clone ID: LIB3829-032-Q6-N6-H8
aaaaaaaagagaaacccctttttttttaaaaaaaaaaaaaaaaaaaaaggggggttaagggggggaaaaaaaaaaaaaggttttttaaaaaaaaccccccccccgggggggggggggggggggtttaaaaaacccggggaaaaattttttccccgggggaaaaaattggttttaaaagggggggcccaaaaagggggggggggggaaaaaaaggggggaaaatttttggggaaagggggccccaaaaaatccaaaaaatttttggggaaaaaaacccgggaaaaaatttttttttgggggggggaaaaggggggggtaaaacccggggaaaaaccccccaaaaaatttaaaaaattgggcaaaaagggtaaaaaattttggtttaaaaacacctttatgggagattttaaaaaaaaattgggg

SEQ ID NO: 15961 - DNA, 523 bp, Gossypium hirsutum
  Clone ID: LIB3829-033-Q1-N6-A10
agaaaaaaaaaacgggcacattcttcattgcaaagcttaaaagtgttggaagggtttaccaaagtataactacacaaactccaaaagaaagctttaaaacgaagggtacaaaacaaagtaaaaggaaaaagaaaatccatctacctctacttaggagcaattttggacaatcaagcacagccaagtgacgcattgtaattagattgcagagaaagtatccaacatttggataatggaggccaaaacagcataccattgagaacaaagagctcagtactcccacttcttcagttccataccatccggaggacttccttccaccttctttacaccaacttctttccagtttgtcgaaagaacagtcccatttgattccacaaaggatttctgcatggcccttcttgcatcctcgtcagcatcctgataaatgtcgcggaaaaatttattcaaagctgcatcaccatctagcttttcatctttctcctcctttttcacttgagcttcgattttatcccaatcaacc

SEQ ID NO: 15962 - DNA, 520 bp, Gossypium hirsutum
  Clone ID: LIB3829-033-Q1-N6-A11
gaggaaccaacaatattgagagaattagagaagcaaccacaagggcaagcagcagcgtcactagaccattcgaagcaatctctagttacattcgagctccgatattcggcatcagaacttcccacgcatagcaattagagcaagtcacctttcccccttcctgttttttagtacaaagaaagtagcgcaaggtcgccatggaaatttttcaagggaaggtctgatgctctctctggatagcagagttgtctttgatgccaaaagaagccttaagccccacgagatccatgcgaatgcctccatattatttgcaaaccaacgcgaagatgaggaggatgacaacaataaacaatggtagccaccaagcataattgcgaggcttatgggattggaaccgttaccagattcaaatcctgaaccaaatgaaaaagctcaaaatgataaaatataagggtaataatttaacctaaaatttttatttgaaatgataatttaatgtgccacattagcgttaacgata

SEQ ID NO: 15963 - DNA, 516 bp, Gossypium hirsutum
  Clone ID: LIB3829-033-Q1-N6-A12
gataaaaatcagggagctctgatttcatctcataatccattcaactggaaaaatacatctaaaatctgctttaaaaactaaggagtttagaaatttagcgtcaatcaacaacaacaaaaaaaaaacaacccctcgaagaaagttcaagaacagataagatccgatgtcatattttcctgggtatggacccaaatacagccactaagcttcactcgaatttacaaaactacccctatgttgaccaccctctcttctctcatttctttcccctcctcgacgtggctttcttcgccggggacttgacactcttcggctttacactcttcgcaggagcttttttagccgcaggagccttcttcgcagcaggcttgggagcagcagccctctttccgggagacgtcctagttgaagtcctcgaagccttaaccggcttgtccttaggcttggctgcagcttttgactttgtagctgcagtagtcttcggcttcacagaagccactgccttagtcttggctg

SEQ ID NO: 15964 - DNA, 511 bp, Gossypium hirsutum
  Clone ID: LIB3829-033-Q1-N6-A7
atctcaaacagcttcaattaacatatatcttaacaaaatggtacagtaaatgcctaaatttagaccaaatcatggacatgttttttaaaaacataaaatacaaaatgtgcaaagttatgatcagtcacttccaaagcagaaaaactgaaaccaaaaatgttaaatacaaccattgctccgttgtatatgatgctataaaactaccatgtgcaatgtgaattgatggtgtatccttggttcaattaccaaaagagaagaatggaatgataagggaattatcccacataccaataatctaatcaattccgagacgacagatggggtttcgtttcatgaggctaagatccaccttgtgtccgaatagatcccggatgttatcgactccgtagagtatcatagttggtctttcgagagaaagtccccaagcaataacacgaacatcctcagggaatcccatcggaagcaacatttcaggtctgaacatgccagaatttccgatttccacccattt

SEQ ID NO: 15965 - DNA, 503 bp, Gossypium hirsutum
  Clone ID: LIB3829-033-Q1-N6-A8
gctatcaactaacatcacaatttgcatttactcagcgaatataacaccacaaaaatactcatcacacactacaaaacaaacagtaccaaaagaaaaaggagtaaccacactgatggcgactaataagttagcctcatatcaggcatcacttacagcaagaaaaacactaacaagaagctcaatccaacaacagcaagcctttcagccccaaaacacatagcagcattatcatcatcagctacctgatcagctgggtcatcatctggtgactcagctggtgagtctgaatccggtgttggtgctgccttagacttagtcttagacttggacttggttttggatttagatccctttggtgcatctgctgcctcctctggggcaggggctggggctggactaagagctgccttgaacaattctttaggcatcaacactttatcaattgtataaattgctaccggctgctcgtcgatcagagtcccggttattttgacagtgttaac

SEQ ID NO: 15966 - DNA, 510 bp, Gossypium hirsutum
  Clone ID: LIB3829-033-Q1-N6-A9
atcaccatgtctttccaatgaatcgatgttagaaccatgaacctttactgtttcattcttccttgttccgtctcgataaatttctgtttcatcccgtttcgagtgagaatgtttcttatatctatctcgatcaccatagccatcattttcaatttcaatattcctatctctatccctactcctgtcccttctcctttccctctcccgctcttggttccattcttcagttttttcccttctcctatctctatctctatcataagcactgctatgatccctgctccaatctctttccttctccctcttcctatctctatctgcttctgtatcccagatcctatcatgcaccttctcccttctcctttcaccatctagatccctgtcccggctcttccctcgctccttctcccttctcctttccctctccatttctctctccctactcctctctcgctccttctcccttctcctttcaccactcatgtctctatctctactccttgctcgctc

SEQ ID NO: 15967 - DNA, 508 bp, Gossypium hirsutum
  Clone ID: LIB3829-033-Q1-N6-B10
cgttagctatgtcagttttcaatagtaaaaaagagatttttacagaaatgatcgatttgttctttaatctaacatacaggggactaatttgtttatttttttagtaaaaagagcaaaatctaatctaactcgtaataaaaaggcctccaccgtacttttaccctttttttacagcagttgaaaacaaaattgtgtgtgcatcatgaaaggcattggtcatttcccaacggctaaagatggaggataatgtgaatataagtcgacagataaaatttcaggtttacctcaaatgaactgaaggccatgtacatttttgtacaaatgtgattagccactcttgttatcaagaagacttatccgtatgccaagatttgtccatcagctgcccacttccctagcttttatcatccattgagattgattcaatatcctctggcactggaccttgcacaataaggtcatcccagaaactagaactatccagtaaggcatctatgtcgggatcagg

SEQ ID NO: 15968 - DNA, 532 bp, Gossypium hirsutum
  Clone ID: LIB3829-033-Q1-N6-B11
ggaaaatcatagtaataggaatttatttcattaacaaagcaagcttttacaagataatttattctctcatcacataatataaaactccatataaagaactctcttttttttttttagagagagagagttctatatgggcactcttgataaccgggaaaggtagcttaagtaggcacataaatataacacatagtaggacaaaacattagagttttgatccttggttgggcaaatatacagcagcaacactctcttaagcatccaaatgaatcatgcatctcagacctataccctggagcatgtagtcaaatgccttgtttatatcggcaaaaggcacagagtgtgtgatgaacttgtccatatccagccccagctccttgttcaaatatttgtcgacaaccataggaatatcagtgcgtggtttatagttgccataaaaagcacccttaagggtcctctcacttagtagattcattggatgagttttgaatgcatcgtctttctttggcacacccaccagcacacaaacacc

SEQ ID NO: 15969 - DNA, 482 bp, Gossypium hirsutum
  Clone ID: LIB3829-033-Q1-N6-B12
aaaaaaaactcgggaaaattgattaattaatagcatgttgtccagaaagcgtttagcatgtgaaaactgaaaagggggaatttagaactttagcatcatttccgggaaaataaaccaatcagaggggaaagggaatattcattcatcatttaaccgaaagcctaacctcattcagtctactcttaaatcttctaaaggggcacctatattttcattccttgaatctcttcgtgcgagtatcattcgaagggaactcagatacatgagggtcacgtctggaagcttccgatctgtatcgtactgctgcaggttcctgcatcttgctgctcttctcttgattttgacttcttgagtttcggaaaaacccatccttggcccatgtaacctcataatcagcactcaatcgagatccttgcttttgcaacgagcgaccacataaaaccttgagggcattataaaaatcccgggatttctcaaattga

SEQ ID NO: 15970 - DNA, 418 bp, Gossypium hirsutum
  Clone ID: LIB3829-033-Q1-N6-B7
aaaaaaaaaattaagggtccccaaaaaaaaacaaaggggattggtttttaaaaaaggggttaacaaaaaaagggcaaagcttaaaaaggaaaaaaggggtggaaaaaaaaaaaaacggcaaagtttggaaacctaaaaaaaaaaagggggtaaaaaaaaaagtttgggggctttgaaccaattttaaaaggggaaagccgaattttccaaaaaaagggcctgtatggggaatttggggaaaagggggggcctgtaaaaccaaaccaggggggaaaaaaccccggttttgttcaaggggaaaaaccatggttttgttaacaacgggggaaaaggaagggaaaccccaccgttttttttcttttttaacgggacccgggcggaaaaaaaacttttggggaggggtagccacttggggggg

SEQ ID NO: 15971 - DNA, 545 bp, Gossypium hirsutum
  Clone ID: LIB3829-033-Q1-N6-B8
gtccttaaaaggatggttccaaagtacagtgaaactttttagcaaacagggaagcatatggggtttagtaatgtcagtgacttgcctccaagtgacactgttgttttatcccaggataatctaaaggcaaaacctgttatcgtgatgtatgttaagctccagaatggccggagcttgactatatttattgaagacaatcagacaggttaggaaattacaaaggatcagcaacacgcttggtatgggatcaacggcaggaaactacggacatgataggggtgaaagaagatagaggatcattaacctctggaaggtagcttgaaaggtaaaaagcaaggacctggatgaactctagcggattgggatactataagctacgttatccattcctttaaattaggatcgtgcaattactgtgatgcagaaatctgaaaaagatatatttatgtgacagcatcagcttttgacatcacattgagagagtcgttgttgttgatgactataaggttcttacgattgtgatatatctggatggaacgtcgaaa

SEQ ID NO: 15972 - DNA, 507 bp, Gossypium hirsutum
  Clone ID: LIB3829-033-Q1-N6-B9
aaacaaagtaaaaagccacaaaactgaaatatacgagtaacatcaaatttggcacaattgtcaagaaccgtacacatataggacaggttaggacgagcctaactaccattggtaaaatttaagaaccttctctctcaagcaacttttatgcttcaaaacattccatcaaatccaaatatgcccaatgctaccaaaaagggggtgggagagaacagatttctttttttcctttttacagaaaacactaaatgttgagaaaaccatacatacctcggatcaaatgatgtgtgtgagtgagtgtaatgtatgtatgtatcctcagcaggcacatcctccggcttcttgctgcgactgagatgaatttgcgtttgtagacttaagattgacgtcgaccatgtcttcttgttttgttgatgaaagtgtttccattccaggtaaagcggctgcgatcttccgaaaaagagccttgatattgaagccagccttggcactaagtttcaataaaca

SEQ ID NO: 15973 - DNA, 505 bp, Gossypium hirsutum
  Clone ID: LIB3829-033-Q1-N6-C10
aaaaagttcatccatacagaaatgatgttaatcatatactcagttaaatagttaaaatagttggggcggggggggggtgttaataatcagatttacaactattaattactttttcaacataataagttaactgacattaattaaaggtgggtataatgaagtagcaaatcatacactaaaccaacaatgcaactggttttcaataaataacttaccatccagaactctttttaaggatttgttctaaaattgtggcgctcatttgggtgagaatatgtcttagaggggatattgtatccatggagaagatcccggattttggcatatgtcagaatctgcgaagggtcgccaccgttgctgctctgtgaagtgtgtgaactctcttgcagctttatcttttcaaacaaatacttcttctcagcctcggcttcactcaaacggagtttgagataactgctagtatactcttcctctgatttgtcggatttggcatgagcaattcttt

SEQ ID NO: 15974 - DNA, 517 bp, Gossypium hirsutum
  Clone ID: LIB3829-033-Q1-N6-C11
gaccaaacaaatacaaaattctgattcacattcgaacttattgatgctttcaaccacaaaagttccaagattgatgaatggcacaagaatattgccaaaataatatgcttacaagtaattttattgcatctttgttctccataacttatgccgggctgaattgtcggatcatcataacccatttgcattacagcacgagttttaatagacacgagctttaggtgggaatgactcaacttcatcatctaatgtgttcatgtgaactggccggtaatccagtctcaccttctcattctcccaaaaacccaatgtgtgtttcatccagttctcatcatctcttttcgtaaaatcttcacgagcatgtgctcctctgctctctttcctagcttcagcggagtgcatggtgatacaggcatttatcaaaagattttccaactcgatagattctatcaaatcagagttccatattaaactgcgatccttcaacttaacatcatggaagctttcccatgtctta

SEQ ID NO: 15975 - DNA, 538 bp, Gossypium hirsutum
  unsure (1)..(538): unsure at all n locations; Clone ID: LIB3829-033-Q1-N6-C12
agaataaacanagatagtctcaacaatgggagaaaatttctctctcttcaatttgattcatatcatgtgaactatccaaaacatttcattgagcattatacaggttttggatgattgtgaatgtaataggacaccaaaaagagtgagaagtatgtatctctacagagattagcttggtctggggtatggtaattatttttgtaggggatgttctgataaggctttgaatgaatcagtattgcttttgtatatatgtcaatgaatgaagctgaagctagcaaactgaggttattcaagctggaactaattagtggagattatcgaccggtgaataccgcaatggagcttctcggggttcaaacacgttgagaaattccaataatgttgccatcttcagtccaatgatctggacctggggattcgaatgcccttttagaaacacgtcggtgatctgtgtacatccgaagagttttagcagcttcagtgacgagcaactatctacaaccaaccctagtgcctcatcggttaaattccgcgg

SEQ ID NO: 15976 - DNA, 510 bp, Gossypium hirsutum
  Clone ID: LIB3829-033-Q1-N6-C8
aggaagaagtgaagtgggaaattttattttcatctattactgatacccgagtatataatagaccacaagcatcaaatgtgggaaacatgacatacattactcgctagaaaataaatagaaacgggtatcaccacaaaaaaaaagtagaaatgaaataaaattaacacaacatagtggaagacgaaacagtgctaacacaataaccagcagtagggtaaaagttttaggcaaggatttcctccaatggcttggcttcaagcttgggcttctcattctcagcctctttctccttcaactgttgctgctctttggccagcttcttcagcctggcaagctcaagatccttgctcatcttcctcctatacatctcagcaaatgtgatgggctcctcaaggattggtttatctccctctctgatcttcaatggatacactgtggcatcgggtgctggattttggaacgtggctattgacaatctgctgcagtctgagttcaccactgcttggtgat

SEQ ID NO: 15977 - DNA, 482 bp, Gossypium hirsutum
  Clone ID: LIB3829-033-Q1-N6-C9
aaaacaacctaaaattaaaatatattattattatttggttgaaacagagggggcgacagaggaagagaagcggggcagggcgccccaggggtacaaattctccaaagcttacaccattatgaaacttaaagcccaaggtcaaaaaaattatttaaacgaaaaaaatactcaagccgggggggaaaaacaggcttccaacttaaagggggcttaaacctgggcggggacggaagcaactggtaacaggagatgaaagaagaaacaaatccaaaggctcccgtaactcaaggggggaccttcttcggggccaatagaaaaagcccaaccgctacaaaaaaatccattcccgctaaaaaaagggccaaagccctcacaatggaaaattggagctgggcacaaaactccgcattcttggacaagccactatccttaaatcttttttccaactttttcatgggagcacaaagccttccaaactcccc

SEQ ID NO: 15978 - DNA, 514 bp, Gossypium hirsutum
  Clone ID: LIB3829-033-Q1-N6-D10
aaatcaaaatattatttgattgatctgaaaaatattgtaataaatacgttgatggaaccataatccaatctgatatgatccctaacttaattgtatttccattccataattcgaaggacctgtttcattctttataaacatgggtgacttcctttaattagaagaaaagctcattgcttggactaatctaatcactatttcagtccacaaatcccttaaataaaaacttaaagcttttcaagatatgtaaaacgagagtataaacactaatacaacactcgattcgagtctgaaagaccaaagagtgcccaaaaccggagagtttgatgttgcctaagatggagccccgaggtatgaagcaagccgcaaaatgtcactgaatattccaccggctgttacttgggcaccagcacctggaccacggactatcagtggctgctccttgtacctcttagttgtgaaagctatgatgttgtcggatcctgagagttgagcaaatgggtgacttttgctg

SEQ ID NO: 15979 - DNA, 530 bp, Gossypium hirsutum
  Clone ID: LIB3829-033-Q1-N6-D11
atgtgaaaacaaagatttcttttagatttcccactaacaaactgaaaactaacaagcccaaactaagaacaatagagaaagaattttagacaagaaagacacatggatgttgcaactaaaaacattgctgaaataacatgattcaagggattacagaaccaaaactcttgcattccattaaagatttctggtcagcaccttggcagaaaaagaaacgcgatgggcacctgatcaagcagttgtcagcaaggctgacatttgcagtgtctggtttgagtaccagcaatggccctggaattggtccgaacaagtagttccccccaagcaacagtcttgcaaacggggcaattccggaggcaggcagagcggctctcaatgcgtattggatagggatcatacccgaaaacttgttgttttccatggataaagctgacaggtttggcattaatggcaagaaaggaggtaaccagccttgtagctcgttattgctcaagtcaacagcaataagctcactttgggtgcctagatta

SEQ ID NO: 15980 - DNA, 534 bp, Gossypium hirsutum
  Clone ID: LIB3829-033-Q1-N6-D12
caaaaaagtaagtagcagctgctaaatttacccaagaaaaggggaaggaaaaaaaatttacttcggggagaaacatctgaggctactgctgcatttctactcatccacttctggatgtttctatggaggctttgtgagaaatacaaaagagacacaaaacctgaccgtaattgtctctatataaatccgaaatgttaacatgctagccgtagttaaccagaagattcagaagttcggggtgtctatcccgatttcatcaccggtgtcacttcttcctgcttgcttacgggtatggtgcggagaaagtataaggtcatggtccaaattctttaagagtacactgtttgattgctctcttctcatcgtactagcatcaagagaacagctttcctttagatcagattctcgtgtatcaaagggaagtgaaactgtggttgttgcagctagaccaaattctggggtgtttgtcttcagttgatgatgatgcagaatgtcttccctgcaaatatcctgagatgatgagaggagctgaat

SEQ ID NO: 15981 - DNA, 517 bp, Gossypium hirsutum
  Clone ID: LIB3829-033-Q1-N6-D7
aagaaaaaaaaataatttacagttacctttgaaccttgtgccaaatattttgaacatccttttgctacaatcatattttctgctaacttcaacccaacacgtcttagaaacataactccaccttctactttgaaagaaaattacgggagggaaaagaaaatttcgggtttcggagatgaggggggaaaggggaaaagagaattgagctgcctacccgagaacaaagatatgtttcttccctgctaagatatttcttgacctcgatactaggatgtgctatggattttagggctaccaaaagtgttaagagtcgatgtagcatttaacgcgatggtcagcaggaaagtgaaagaaggttttgctaccagctcccaaaaaaaaaagttaacccaggaaatacattgcttcttggaccatcttttatgcatagtacatgtacaagctgttagcagcaacacaagctatcaagttttcggtggggtgccacgctaagtgcagcaactttgtcgtgaaatca

SEQ ID NO: 15982 - DNA, 526 bp, Gossypium hirsutum
  Clone ID: LIB3829-033-Q1-N6-D8
gcaagaaagaaaatttcgccaatggtttcactgtagtacatttaacaggtctgagttctaaaacaaaatcttgctactgctaacttacatgtaggaacaagctgaacaatgacaaccaaaaggtaaatttactgtacattgaatgccttctacaggaattgttgaagaattgaaggacaaccaagagaagaagctcaaacgaaatggaaatactggaagcaaatacgtactggattcaaacatttatttttacatgacctgtctgcccctttgttgaactacaattttattgacgatctcccctgctgaggtaacaaagtaggtcaccatctccagtgagccgagtctatggagaagaaacccatcagtcatttctgttctaattcggtatcttccattgccagaacccaaacgggagttctctttaatcaaacctgggtttcctatataagcaacattatcttgaagggcatagctaaagcaaccttgctggcttaggtaaacattcactccaaacttcacgaat

SEQ ID NO: 15983 - DNA, 535 bp, Gossypium hirsutum
  Clone ID: LIB3829-033-Q1-N6-D9
gaaggggaacgttatatgattaatcatctgttctttctttcaactgagcatttccaacaaaacccaataactatccaatgcaactcccagtattcgaacaaaaataccgaggggcttgaaacagaggagacctaaaaaaatattaatagagagagaaaatagaaaagaggataaacaaaaggaacttcatggctcaatagcattcacttcttgccactcatcatcaaccgtttctttccacaatgtaacattgttattggcatcggcaaccgacaataagtttccagtcagcgaccatgagaccctccaaactggggtcttgaaatccttcaaaatcgcacccttccattgttccccttctttaccgcaagtccatataataactttcccatcctgagaagcacttgcaatggtggattttgggagccccaagttgggtgcccaagcaacatcccgcacccaatcagtgtgcatctggagggcagggctgtagtccatcttccaactcccattatacagcctccatactttgacc

SEQ ID NO: 15984 - DNA, 509 bp, Gossypium hirsutum
  Clone ID: LIB3829-033-Q1-N6-E10
atccccagaaagggcatctaatatttaagcaagtgagctaaaatattacaatgacaacgatgcgaccataacatactgccatcaattacttcaattcttctaacaagctatgggtgctgcactagagatgaatcataaatcattaggtccattatcataatttagtcttctacaactatcaatagcattgcaatagcagccaaaattgtagttaactgctgcagttctcgggtcatccaaatcaatccaataggtaacagcgaagctcagcgcttgagttgtctcctagccaaagcaggggcacgcttcggaatatagacctggtaactcacctgtaccatttccccaccccgcattacagacattgtcttttgttgaaattgtgaaccatccttggtctcatcttccagtttatctgagctaatgtttccagaagaagttggcttattgcatgtatcgttaactttactgcccggattgccacattcatgggggttcacactttggga

SEQ ID NO: 15985 - DNA, 512 bp, Gossypium hirsutum
  Clone ID: LIB3829-033-Q1-N6-E11
gggaagtagaatcatgagaccctacaaaattacatgttaagtttaccataagatgctctgtctcgtactagaaacacagaccaaaggtctaaagtttatgtcctaacattgttccttgcatcagaaacaatttcctttaaaaaaaatatatcccctaaattcatcttcttaactatgctaaatcaggatagtagacagaccattaggccgtcaatcgcagccgagaactccacgagcttcggctgaccctgcacttccaatgtcttgcttgccttctccagaagagccatgcctgaaaccagggaaaactccagctccaagtgctccgttgccacctgtagtgctagcttcactttgcagcatgtgaagacctgtgcttccaccggagctcatgccaagtggaccatgcagagcttgttgttgttggtgagcagaaaaggttgctgaccatacaacatggaggaccgtgcagccataagcgattgtggtgtcatctgttgagtttgttgctg

SEQ ID NO: 15986 - DNA, 497 bp, Gossypium hirsutum
  Clone ID: LIB3829-033-Q1-N6-E8
ggagaaaaaaaaattctatataggcactcttgataaccgggaaaaggtagcttaagtaggcacataatataacacatagtaggacaaaacattagagttttgatccttggatgggcaaatatacagcagcaacatttccttaagcatccaaatgaatcatgcatctcagacctataccctggagcatgtagtcgaatgccttgttaatatcggcaaaaggcacagagtgtgtgatgaacttgtccatatccagccccagctccttgttcaaatatttgtcgacaaccatgggaatatcagtgcgtggtttatagttgccataaaaagcacccttaagggtcctctcacttagtagattcattggatgagttttgaatgcatcgtctttctttggcacacccaccagcacacaaacaccccaaccatcatggacgcattcaaaagcggaaatcatggcttggacgctccctgtacactccacactgcgatccactcct

SEQ ID NO: 15987 - DNA, 512 bp, Gossypium hirsutum
  Clone ID: LIB3829-033-Q1-N6-F10
caaggcaacaaacaccatttataagccctgccaaaattaaaatagtttcacaaactcttcacattttgggggatacattggtttattttctatggcatcataaagaacaaaacagggcaaaggagagagcattaactatattaaatcacacaacataagctcccagtttcccaccacaagcactgaaatcacccaatccaaaatttcaccttctatataatttcattaaagggctttttttaaaaaaaattcagttctttttggagactccgagcctcaacctaaaatcctcctccattagaggaagaccatctcgcaacttcactttcggctcccaacctagcaattctttcgcttttgtgatgtcaggttttctttgccgtggatcgtctggagtgttctccaccatctttatctccaccttcggattaataagctcctttactgtctcggcaagctcaagcattgtaaattcacctggattcccgatattgattggaccagtgttctcc

SEQ ID NO: 15988 - DNA, 527 bp, Gossypium hirsutum
  Clone ID: LIB3829-033-Q1-N6-F11
cactaatcaacggcatttttattagtagtagaaaatattttacatgagtgatagcgagaaacaggggattagtatgggatatgcatagcagacttcttgaactgcatgctcatatatgtatatatattcttttagcaacttggtccattacttgctaacctttgcctaaatttgatggcttttcattggctctaggactaaatggccctcttccagcatttccaggacttagctcacctctcagttggcttatcctggggctatataccttttccgaagaaccgtgggctttgaatgctcttaaattctttggacggagttgttccggacgagcttgttaccttcgggctgcacatgtgtctaatctcaccccggcttcgggtaatcattccgtctaaaatctctccatcatcagcaaaggaagctgtcgtaaccagctctccttcggttataaggttgaacggtacatccggtgattcttcgtactcggcagcatccaaaacttgaaggtgtgcccctttgaaaaa

SEQ ID NO: 15989 - DNA, 541 bp, Gossypium hirsutum
  Clone ID: LIB3829-033-Q1-N6-F12
cataaaaattatatatttaatctaaaaataaattataatcttttgaaacattgaaataagatgttaagcaattagaaagtaatatatgttaagcccagtcaaccccacctccctccgaacagatacaaaacagtcaaatagtaatccttgtgaagtaggaaaaaccattttctacctacattagtttaatatttcatttcacctataggaaatgaaagtctgaaggaatcagggtaagagatgtgcagcatataagaaacgggcccataacatatttccctctttctacttactaatggggcttacttgtgaatgaaactattgctggatcctacttactcactttcatcatcactttcctgcaaactcaaatgggtcatattcctttctagaggaggtggcccatcttcagaatcattggaagaaccctcctcatcttctgaatcattggatgcaccttctgctgcatctgggggaaccttagggacttgcctttgttgtgaaagccaagattttggactgatatgatgtcagcactatt

SEQ ID NO: 15990 - DNA, 524 bp, Gossypium hirsutum
  Clone ID: LIB3829-033-Q1-N6-F7
gaaggcaagcaatatgttgttttgttttgatgatgggaggtaagaaataaaaagctttagtccacatgtgatctacatctagccaggaattgttgggcaaagcaagacaagtgaatgaaagagaatgtacgacacataaaaactggatccaccgtttatagaagaaatcaatcacacaccaaggttccggtttatggtgaaaatccatagtgaaactccgaacgctatctctactcccacccacttctttgcctttcctccatcactcttgtctgcagcagcagcagcagtggtagtggagttggagttgccagtgtgtgtcagcttctgatatccttgaaataacttagcttcctgggaatcgggagttaagtgcagaagagagatgcagtcggtcatgttgacaggggcacgacaagtgataggaagtgttgccgcgagagtagcgttgatgttgaggccaaggctggggtcatctctatctttaagcaatacacacaggcatttccggctcttatccagca

SEQ ID NO: 15991 - DNA, 524 bp, Gossypium hirsutum
  Clone ID: LIB3829-033-Q1-N6-F8
ccataaatgaaattgacaccttcaacttcccttaagataacttccccgaatcgtggtataggagctacctcgtactctatagtgccatcgaattcacgactttgttttcaaaatgggtgttcagttgataaccatcgacgatgacccatataacagaacttctgaccatactgtagccatcgagattcagttttttcaacacaaattgggcaagcaacccgaccttttgtactccaccctgaaagattggcgtaagctgggaaatcattgattgtccaaagaagacaagccaagtgaaagattcgaaaactgatgaatcaaaagcatcaattcctatccacaattgcttcaactctttaattaaaggttgcatgtagacatcaatgtcgttgccaggtcctttttcaccagggataaccattgacagtatcattgatgattgtttcatgcatgcccaaggttctaaattataaggaataagaagtacgggccatgtactgtgacttgtactcattgttcggaat

SEQ ID NO: 15992 - DNA, 510 bp, Gossypium hirsutum
  Clone ID: LIB3829-033-Q1-N6-F9
cgagaacccttataggaaaagggtgcactagggtttcaaaattcaaagatttcttgcttaaaatttcaaatggacgaaagagataacaagtagaatctcgtaagtaaaacaagttttcgacttccttttccaaacataacaaaaattttaacagctttaatttaagtcttatatcaggacatctcactagaacaacaaaacacaatctagcttccatcgtagcatccacatcgaacccggattcccccaaaattgcaccaccccacatgcctagcttaagcaacgagagtgctggctgttgtaaattcgtatttccagacagggggaagcttctttgttttcttgtagtagcgagcaagcctgtgaatccggctctcaacaaggatcaacctgaacttggaatccttatccttcctgtttctctccaaatgctttcggatggcaaccgcctttttgataaggtgatacaaatcctccggaatttcaggggccagaccgtgagccttgagg

SEQ ID NO: 15993 - DNA, 540 bp, Gossypium hirsutum
  Clone ID: LIB3829-033-Q1-N6-G10
tcgcggaaggattgcttgcacaagtgtttcacaaatcgtgatcatgagaaaccccagaacaggaaagttggaaaggaggcgtcagatgccctaccatatgcacataaaccttgagcttctggaggctgtgcatttgatatgtgctatgcttcttgaggttcctaacattgcagccaactcccttgacgccaaacgcaatgtgataagtaagacattcaggcggttgcttgaggtgagtgagaggcagccatttacaggtcccccagacaatgtgcgagaccatgtaatggctgcaacccgggccctctgcaagggagatttccagaaggccttcgacgtcattaattctcttgatgtttggaagctccttaggaatagagagagcgtgcttgaaatgctgaaagctaagatcaaggaagaggctctgaggacttacctttttacctactgttcttcctatgatacactaggcctggaccagctcaccaaaatgtttgacctctcagatgcccagattcatagcattgttagcaagatgtt

SEQ ID NO: 15994 - DNA, 526 bp, Gossypium hirsutum
  Clone ID: LIB3829-033-Q1-N6-G11
ggatagaaactgaatttatgattagccctttagtacaacataaacagaaattccattatactgaaccacataaacaggaattccaatgcattggctaaatggtacaacatggacaccacatccgttcaagcttttctaaattctaccgcaactaaggcacaatgcattaaaatttacccttattctgtagaaacaagaccatattgtaaacagaattctagataatacgcattaacaccatcatcatcggataagttgctcacttaacgtactttgcaaaccactccagcatatcttgatgagcttcattagcgcatgacacagctgttgtatcattgacatcgtatctgaccgtccatccatgggcacatttaggaaatatcttcacaaatctatcaacctcactcgcttttaatatctcatcaaactgttttacaagttctgggggagacaaattgtcaatctcagctcccaatatcgcaatgggcaccttcacactcttgatatcgtccacagtcacaaatga

SEQ ID NO: 15995 - DNA, 100 bp, Gossypium hirsutum
  Clone ID: LIB3829-033-Q1-N6-G12
atgagaaaatgtagtataataagggagagaaaagggggggggggggaaaaagaaaagggggagaaaaaggaaaggaaaaaggaaaaaggggggggggggg

SEQ ID NO: 15996 - DNA, 523 bp, Gossypium hirsutum
  Clone ID: LIB3829-033-Q1-N6-G7
aggaagtcgaatatttcctttccattagtcaagtctcatggacaatgtattacatgctattaaggaagtcatataagaagtgcaacataaatcaatatcacagcttgagcatttgataatgtttaaccacgagaggtatgcaacattaagtctgggcacactaatataatacccaaattttactgtaatttttaccaaatagtcgcaaagatgatcacttcctcaaactttcaacaatgtaagatgcatatagatccatggaatacttgatggctgcaatagcagtctcagctggcaaaaagtcttctacatcaaccttcttgttctcattctttttgtaatcctcgaagaagcggcggatttcagccagacgatgaggaggaagctgtttgatgtctgtgtaatgacggaactcgggatcatcagcacatacagcaataatcttgtcatccttctcaccctgatcaatcataggcattaacccaatagcacgagcacgaagaaaagaaccaggcaaaacagg

SEQ ID NO: 15997 - DNA, 355 bp, Gossypium hirsutum
  Clone ID: LIB3829-033-Q1-N6-G8
gcaaactgggtgcatatggggttttataatgtcagtgacttgcctttcaagtgacactgttgttttatcccaggattttctaaagggaaaacgggtaatcgtgatttatgtcaagccacagaaagggcggggctaagactataaggagggaagacaataataaatgttcggagactacaaaggttcagcaacaccgttggcatggatcaacggcaggaaactacggacatgataggggtgaatgaatatagacgagcaaaaatcctggaacgagctcaaacgataaagcaaggacccggcagaactctagaaagattgtgatactatgagctacagtatgccattctctttaaag

SEQ ID NO: 15998 - DNA, 512 bp, Gossypium hirsutum
  Clone ID: LIB3829-033-Q1-N6-G9
gttgctattattatgtaaaagggttcctacaatgaaagcatctaacatacaagaacccccaactcacatgtacaccaacacaggggagggatgaaaaagagggaagaaaatctctgtatgccaagatttttacgggtcggaaccacgccggttatcttcttcgacccaaaaatcgataaccatgcaccatattaacatcacagtaccctttatttgctgcataatttccgattttcagtcctttaagctcagtcactattaagttcatgttctgcaactggttttttgtcatcgtctccgtttgttgccgctgatgatttgctctttcgggagctttggacaggattgtccgggtcgtatttctgggaagctaagtaattcagagccataacgacgtcagttattgccggccgcatgttgggttgctcttgaacgcacattgcagcaatggcaagtgcttggtagagacctcggaccggatattgaccttgtagtaaagggtcgaccattcg

SEQ ID NO: 15999 - DNA, 500 bp, Gossypium hirsutum
  Clone ID: LIB3829-033-Q1-N6-H10
ttttttttttttttttttttttttttttttttttttttttttttttttttttttttttttttttttttttttttttttttttttttttttttttttttttttttttttttttttttttttttaaaaaaaaaaaaaagggggggggtaatttttttggaaaaaaaaaaaaaaattttttaaggggggggggggcttttttttggggaaaaaaaaaagggggggggtaagcttaaaaaacaaaaataagccttgggcccaaaaaattaaaagggaaaaaaggtcccttaaattgggccccaaagcaaaggggaaaaaaagggggggaaaaacggggggaaaaaaaaaaaaaagggggggggtggagtttaataaaaaattttttgggggggggggggccccaaaaaaccaattcggggtttgtcaaaaaaaatcccaaaaggaaccagggccagggggaaaaaaaaacgggggggttttttaaggggggcccaaggcccttt

SEQ ID NO: 16000 - DNA, 531 bp, Gossypium hirsutum
  Clone ID: LIB3829-033-Q1-N6-H11
agcagagttccaggaatgaattctcaataaatttatagaagcttaggcttcttttctcctaccgggagaaaaaaagctatgttctagcataagatgaagcaaagaaaagcatcatagaactacagaagaacagaaagggagacttatccaaatccaagaggccaagggcgtggcccaattaaaatagaatcattgagggccaaacaacctaaacacacttaatctcagtctcctcgataaattttacatccttgcagtacttagctcctgctttgtcggggttcccttgcaccatttccattagcatatggcaattcctcacgaccacgatatggtggggacttgctgtgcccacccccacgaggagagggactgcgacgtcttggagatcgggcacgaggactataacttcttcgtccatagcttgggctactacgatatctagggctgcggctgcggcgtcttcctgaaccaccacgcatgcgacattctcgagcaaaatgaccaggctcaccacactcataacacttc

SEQ ID NO: 16001 - DNA, 460 bp, Gossypium hirsutum
  Clone ID: LIB3829-033-Q1-N6-H12
gggggggggggttttttttttttttttttttttttttttttttttttttttttttttttaaaaatttaccagccattaccgggtttatttcattttattaatataattatactacaggggttcaaatttattaatatattatactacagggggtgaggggggacatgataagggaaaaaagggaaatgatttgctattgcattactttctctatctaaaaacactaagggggggttgctgtatcaaaatgcaatcttctcaaattacagttccactaggaatcaagggatccttgattactggcacaatcccactctttataaaatatccatcggtttcccttgccgctttttgcacgttttcactggttatgaacttcacattggctccaattcgagcattcttggcaaaaatgggtcttttgatatgggagctctttcctataccaattggaacactg

SEQ ID NO: 16002 - DNA, 515 bp, Gossypium hirsutum
  Clone ID: LIB3829-033-Q1-N6-H7
attgccagtaaaacatatatgtatatatataaagaagcaaattcatttactcaattactaccactcaagactaccttagatgagttgcacatccagtttgtctttgccagtttagcaactacgaggagaagatagtcgtagccaaaatgccggagtcggcaccatgattcaacttttaagatctcagcgaggccgtaccccaaaattattggaactgaaaagcagccattctctgtatatccgcagatcataacaaaatatccggtaacattgaatctcaagagagttaacctagaaaggcattattgagtatcaacgcctaagcggttttggggactttattggggagaacattatcgggaaggataagctcgggaggtgtctcgcgaacaacaccgagcattgaatcgtattcctcatcccgacgagcaaatttcttccgcagcatcttctcaaattcaatttcatcgaagctctttccattttctgcagcatgaacttgagctaaattggaa

SEQ ID NO: 16003 - DNA, 518 bp, Gossypium hirsutum
  Clone ID: LIB3829-033-Q1-N6-H8
aaaataataaattaataaaggaattaaaataaaaaattagaactcaagttgtcgtaaatattaaagtaaaaataagaatttagaatcaaaactaaaataaataatacattatgagaaacagactaactagttgaacctgcctatgactatacacattacaaggtaataaaaaatacattgcagtctgctgcaccatctttgctctgcaagtttcattgaaggcattccaaactatatcctccacttctgctgaagagtaagctgtatccaagttcttaaacagaacaagttttccaaactcatgtgcatcccgtaaactttcttcccaagggagttatccaaaccatttgctcctatcttatcttgatacaagctaaagacaccattagcatgaataaggtcatatgttcttggatacgtagagaaacctttgcacctgtcacaaatctctcacattgattagactcttcaccctttgcagccaagcacctatgaaattcaatgtagcaggtgaaaca

SEQ ID NO: 16004 - DNA, 515 bp, Gossypium hirsutum
  Clone ID: LIB3829-033-Q1-N6-H9
aggcaaacagattctcttcatatattatatagtaatttagaacagtaaggttcacattctgctgaatgataacaagaaacttacgcatacacggatataccagtcggtgatagtttctcgattattgctagtattagtttaataacaaggagcatatgattcattttctttctcaaaccaaacggctcagatattcctccacagtggtatatttcacatcagggtacagctcagaagcctcaactccgaatgacggttcgatctcaaagttggtatgatcacccctcacaaagactgaatgtctgattgccaatccaacactgtatggaaatgtagcctctttgatctgtttgagaagttggtcctctggaacatatgttttctcaagggttttgccaatcaatttctcccacaaggcaacgatctcattaaatgaataggtgtttttaggaggcctaatgtataggatcttattcaatgttctggggtcatcaacagctttgattgtgtatgtt

SEQ ID NO: 16005 - DNA, 505 bp, Gossypium hirsutum
  Clone ID: LIB3829-034-Q1-N6-A10
catacttgatacatgcaagtataggaacgttgtggctgcttgttacattcaagcacacaaaaaaatatatatatatatgagcgggaaatgtaaacgaaattaagagcaataatttatatgtttgctgctttgcatttccttttattgaaagggggatattctacaggctatttctgggtcatacttcactaaagcctgagattcctcatccttggttcttcatcggccatgaaattgtggtatcctttgttcctccagctttcttgtaagggggcaaaggcacgtgcccagactctatctgcttgatgtcatccacaaggttctggtaatgcaacttcacttcctccacggtcttccccccaacagccctggctagcttgtgccaccggtctggtgtatccttgtcgtagatagctaaagcgttctcgaacaacttgttttgctttggcgtccagttcgaacctgacgccattgcagaacagtgataattaacaatcgaaattca

SEQ ID NO: 16006 - DNA, 479 bp, Gossypium hirsutum
  Clone ID: LIB3829-034-Q1-N6-A11
gaaacaaagggggccagattaacttattagaaatttacatgggattaccagccccaaatcgtgggggtacaatgacggtcacccaacaaagccggttaaaaaaacttcagggaaatctaaacaccccaaaacattaacttatacccttgtttgcataaaaatgcaaccccaatcattggtgggtgccaacttaggcaaccgggggggggaggacatggtcctgtgaagtatccactggtgcaggcgggatgaactgccacattgcaactccaggataaccaatgggaggtcccaacttgttcccaggagcttgacctggagccccaacaaatgcaacagggattgctgatggggcgggtggcataaaactaggttgtgcattcattgctttgaggtgctgctcctgcctttttttttttgccttaagcctttgcttttcggcacaaagctcatttttttcagccttcaactttttaatc

SEQ ID NO: 16007 - DNA, 537 bp, Gossypium hirsutum
  Clone ID: LIB3829-034-Q1-N6-A12
gtacaaatgcatactttatattcacatgggaaaaaaaaatgcagattactgttaaagatacaaccaaaaaaaaaactcgggacctaattgaaaaacatataaaccttaaaaacttctgaaaactaattaaaaggggcttaaatttgttagtctcctaagagttgataaaagctttggctggggatagttatatcaccttcacttgtgtctctaacttaatttcgttgcattgtgattcggctgcctgtcaccggaatgcgaatcccaaggttcttttgtgatccggcgttcatcgcggaatagtagatcatcagcttcgagcaagtggataacatgccccatttttggcctttttgttgcatcaggatcaacacatcgaagagcgactaatagtacacgtttaagcgcttttgaagcaggcatcacgggtaacttaggatcgattacttcttcggcttttcggtttccgaccatgggttttaaccattccactaaatgcacctctccttgtggtcgggtatagtcaaccggacttct

SEQ ID NO: 16008 - DNA, 486 bp, Gossypium hirsutum
  Clone ID: LIB3829-034-Q1-N6-A7
tttttttttttttttttttttttttttttttttttttttttttttttttttttttttttttttttattttttttttattttttttttttattttttttttttttttttttttttttttttttttttttttttttttttttttttttttttttttttttttttttttttatttttttttttttttttaaaaaaaaaaagggggaaaaaaaaaaaaaaaaaaaaaaagggaaaaaaaaaaaaaaaaaaaaaaaaaaaaaaaaaaaaaaaaaaaaaaaaaaaaaaaaaaaaaaaaaaaaaaaaaatttaaataaaaaaaaaaaaaaaaaaaaaaaagggggggaaaaaattttcaaccaaaaaaggggagaaaaaaaaaaaaaatggagcccaaaagggggcccccaaaaaaaaaaaaacccaaaaaaaaaaaaaaaaaacgcggggggggaaaaaaaaaaaaaaccccccaaaaaaaaaataaggttt

SEQ ID NO: 16009 - DNA, 463 bp, Gossypium hirsutum
  Clone ID: LIB3829-034-Q1-N6-A8
gggggaaacatctaatttctaattctcaaaaggaaggggttttcccccttttataataaaagggttagaataaaatatctccaaattttgaaataatgattcagttttggcaaaccctcgtagggccaacccttccatctttggggatctatgcaaaagttccatcccggccctgggagggaatattggtttgggcggggtctatttccatatcccaaacaacattaggctgcccaaaagctttaccatcatcttccagttcagggggaaaaacttttgtttctttaagggggatggccatatcaaaaaccccaacagtttcagtcttgggggactgaaaaacctcggcgggatcttcggattggagcttgttttgggtaacccccgggttgttagattcattaaaaatgacttgggatgagggagggcctgtgggattccattccctattgcaggtctcaac

SEQ ID NO: 16010 - DNA, 537 bp, Gossypium hirsutum
  Clone ID: LIB3829-034-Q1-N6-A9
aatcgctaacactctaaaatcaaatgtataaatctggttcccctaacatacacattacaatagttgtagtgactgaatcaacaaaatcaaatgtgaaataaagaaattcagagattggaacaattatataaattcagacatatcaatatgctgcgcgtctactttccatcacttgaacaccaaaactctactttccaaaatccattgttaaaagagctgtagagaattggtcttctagaaaaataacggccgtacgcctcaagctcttccttcagaaagggaaagggcaagtcaaaccctgcaaaactacatacttgaaagttcaaactaaatcttcagttcctgtcaactttgcaaactcagtttcatcaatagcccccttttttagtttcttcaatagccgatattcccgggtcaattcctcttcatcttcaatggtttgggcagcacgtctctgtttagcagttttcttcttcatgacaggggcggcagcgtatgtggccctttcgggtttctcaggttttgacccacgcgtcc

SEQ ID NO: 16011 - DNA, 508 bp, Gossypium hirsutum
  Clone ID: LIB3829-034-Q1-N6-B10
gtaatcaaaagacaaaccataaccatatttatcaaagtgtaaaaccaaacaggtaaaagccacaaaagccactgcagaagtgagctttagctagacaaccgttcataagttcagataacatacgaaacacctaggagtgttgcaacccaaaagtctgagactactttgaaaaagcagcataaacagtttttggtagccaaaatccaaaagccctatacaaaaagatggttcaacggttttcagcagaagaacatggagctgctgacattatccttcaacctgggaagctgaggaacagaaattgctcccggagcagtcaccccaccatggctcgatgatgtctctgaagcatcctcaaacttcataaattgccccaactgtgaagctgccaaatgagcgtagcaaataggggccacaacagatatggctgtggtgctcctttgatacacgtaggatagagaatgaacaagctcctgcagatcatcagctgaaaacccaacctggtcta

SEQ ID NO: 16012 - DNA, 493 bp, Gossypium hirsutum
  Clone ID: LIB3829-034-Q1-N6-B11
gatccctaataaaagccatagatagaggcacgggttataaagctgttcatatacatatacatatatatcatcacaatggcatccataaattacctaaatgaaaaggggggtacctgcaaagtatgacctaaattatgggtggggaactccgcaaacatgggacattgcaaacattcatgtggagctgtttccgccacaacacaaggtagattggggccaagctcgtttaaagtagggtactactttggaaaaatccgataagatagaagatccgcgaccttggtactggatcacttccatccttccactcccgatgtgatagagatatatgcttgatccaaatctaatgaaaactgatttggaatcttgtggagaaaatgccagtatttcggtttctttccgtgtaacacattttgtggcaagtgttggattctttctccacatgattttgaaattcaacttatatctcaagctccaaaaaaaattgactgtt

SEQ ID NO: 16013 - DNA, 534 bp, Gossypium hirsutum
  Clone ID: LIB3829-034-Q1-N6-B12
gcttgaaaagacttcttttgtttattattgtgaccaacgtgcatacgaagctggccttgggaggactggatgttttatccagagttccaggatctagaactacgactaattaatttacaagaagaaaaagagagagatgtgggcatactctttaggcgcacccacctcagtgccatgtctctcgtaaactcagcttatatacattacttaagccattaaaagaaagggaaaggggaggtccatttcttgctccatgagcaataaccatctttgaatgacgactgaacatgggtccaagcgggaaccttgcagttctcacttcgaaaattgaagagaacagctgtaaccatttttggggtgctttaaggctctactacattccttgtattaggtgcaggctacacggttgggatttcttcactgttatgatgatgcatttgtttctgggacagctttaacagccaccactctggcagcattggctgctttgtttgcagctgacacagctttatgcactctcttgtcaatctttgc

SEQ ID NO: 16014 - DNA, 511 bp, Gossypium hirsutum
  unsure (1)..(511): unsure at all n locations; Clone ID: LIB3829-034-Q1-N6-B7
aactcgcngaaagcactacaaatccatcattgctctcaataatgtcgaacttggtctatcaaatttataaagagtacatcagaatccagcaacactctagagtcacaaattgactgaaaagtttaaaagggtttgggaatgaaccagttggcggcattcaatccatccttcccttcaagatcctttcctttacttctgtaggcgtcacaacatagacatgtcctccccaaccactcagacagtcgcgatctactgatgaaaggagagcttgggaaaccgtctcaaacaattcctcaggttccatgccctccttgaacattgattcacaggcaccatagagagactccgaggcagtgccagctacaacaaaatctttcgcaagctccttggctccgatggaatccatggtgcaaatgaagggcttgtcttcatctcctaatccagcaattacaggttggcagaagtatggaccaaaccttttctcgtaaagaatcgcagaaacaaggttaga

SEQ ID NO: 16015 - DNA, 510 bp, Gossypium hirsutum
  Clone ID: LIB3829-034-Q1-N6-B8
agccgcactactcgtcaaatctattgcagtccatatagagtcttgaacaaagcttcgaagagtcgaagttcacacaatagaataagcaaaaacacacgataaaagcaaacaaatcattgggtagcaaaatgcaagccctccactcaaacattacttatttagtactcatcttcatcttcctcatcaccctcgcctgactcagcaccgacttcttcataatccttctcaagtgcagcaaggtcctcacgagcttccgagaattctccttcttccataccctcacccacgtaccagtgaacaaaggcacgcttggcatacatgagatcaaacttgtggtcaatgcgggagaacacctcagcaacgctggttgagttggaaatcatgcaaacggctctctggaccttagcaagatcaccaccaggaacgacagtgggtggctggtagttgataccacacttgaatccagttgggcaccagtcaacgaactgaatagttctcttggtcttgatg

SEQ ID NO: 16016 - DNA, 530 bp, Gossypium hirsutum
  unsure (1)..(530): unsure at all n locations; Clone ID: LIB3829-034-Q1-N6-B9
aatagnaaattatttcattaacaaagcaagcttttacaagataatttattctctcagcatataatataaaactccatataaagaactcttttctctttttttttttttgagagagagagagttctatataggcactcttgataaccgggaaaggtagcttaagtaggcacataatataacacatagtaggacaaaacattagagttttgatccttggatgggcaaatatacagcagcaacatttccttaagcatccaaatgaatcatgcatctcagacctataccctggagcatgtagtcgaatgccttgttaatatcggcaaaaggcacagagtgtgtgatgaacttgtccatatccagccccagctccttgttcaaatatttgtcgacaaccatgggaatatcagtgcgtggtttatagttgccataaaaagcacccttaagggtcctctcacttagtagattcattggatgagttttgaatgcatcgtctttctttggcacacccaccagcacacaaacaccccaac

SEQ ID NO: 16017 - DNA, 523 bp, Gossypium hirsutum
  Clone ID: LIB3829-034-Q1-N6-C10
attattaactaagggtagggaatgagacggctagaaattaaattttataacaataacaaatacaaatgtatttcttttccttcatccgagttttgtacaatcacttccccataaaagacttcttccctgattctctttccagttttctttttccttaataaagctaaattactcagatcaaaatttaagctaccctgaacctaacaaattagttagaaatgtggaacaagtaggtagatggagacaaaaagataacataacaagcaggaaatctcattttctcttaactttcttggaggacttgcctttgacgcctagatatctctctatatcctcatcatcatcatctccgcccctcctcttttttgtgcctccaatttctttaagtttctgcagtgttgaataaaaataaaattgtcatccaagaaagagttcacaaaaatgctctgaaatttcaaataaacagcaaaatcaaaatactatagaacaagaaatacaagcaaatagatgaatccattacaag

SEQ ID NO: 16018 - DNA, 529 bp, Gossypium hirsutum
  Clone ID: LIB3829-034-Q1-N6-C11
agccaaattactttttttaatagaaaattaaaatttataattacacatttacaagtcctataattacacctcagtcaaagtagcattacttgccattacactatgtcaaacccaaatatgagaataagcaagagtgatgcaatttaaaacttcatgtgaaacgcatttgcagaggattcttgtaagtgtcaacttgttcatgtgaaaatattcactattgccaatttgcctttatttctgttaaaagttacaaaacaggtggcaaatagaccttcaaagaatttatatatttactctgtcctcgtctttttcccggatatgattgacttggctgcccacaaggaatcatctagtctcggtcatctccagactgtctcattagcgtctgtaaatatgggattgtgttgttctatgaggcattgaatgacctcaatggcaccaaaatcaaccgggataccatcatccaaaggaatgtgggaggaagcatccatatcttctccatcttcaagcatgtcccatgcactataag

SEQ ID NO: 16019 - DNA, 548 bp, Gossypium hirsutum
  Clone ID: LIB3829-034-Q1-N6-C12
ggggtttttttttttttttaaattttttttttttttttttttttttttttttttttttttttttttttttttttttttttttttttttttttttttttttttttttttttttttttttttttttttttttttttttttttttttttttttgggggggggggtttttttttttttttttttataattttttttaaaaaaaaaaaaagggaaaaaaaaaaaaaaaaaaaaaacccccaatttaaaaaaaaagaagagaaaaaaaaaaggggttcaaaaaaacacaaaaaaaaaaaaaaaaggtgggaaaaaaaaaaaagagaaaaaaaaaaaaaagttttttttaaaaaagggaaaaaccccaaaaaaaacttatttttttttaaaaaaaaaaaattttttaaaaaaaaaaaaaaagagaaaaaagccctgaagaaaaaagagctgtgaaaaaaaaggtttaaaaaaaaaaggggggggggattttttagaaaaaaaagggatgtttggtggaaaaaaacacgataaagtggaaaaaaaaagactattcg

SEQ ID NO: 16020 - DNA, 531 bp, Gossypium hirsutum
  Clone ID: LIB3829-034-Q1-N6-C7
cttttctaaatcgtgctaaaacttcctgcatttcataataggtccaacttatgttctcaactcgtcagaaactcactatatatacctatgggaactaaaaaaacgcagcactggtgaactgctcatttctatattcgtaaaacataagcgctttctatttcttctcaaaactgattcaaagagaagtagacatgtacatctgtgctccatggggcgacctactcattagttgctggtatactcgagtcttgttggatggatccaaacctgtgtcagacactatatccatctctgctctcttctttaggcaacctagaaacccatttcgttaccctgacggtcattaggcatgtatggatgaagaggcacatccggcctttccaggtgtccaccgcctcatccatcctttgccaaatcatctaggcctggatgattcattccaaaggaaaagcccggtcaaggccccctttgttgccttacaggacgggaaaatggaccgactgatgtccgtctaaccatgctggtgtgaac

SEQ ID NO: 16021 - DNA, 529 bp, Gossypium hirsutum
  Clone ID: LIB3829-034-Q1-N6-C8
aggctataaaaaataaaattttattcgacccccaaaaattattttggcttctcccctagtctcaaggctataaaagttattttaatttagcaatgtaacacccttaacctgtatccgacactagaatagggttacggagtgtagggcccaattttcacccgggcccaacaaacccaaataaaccaaatacccaatttcaacccctacacatacaaaagcataaagccagcccaattacataaaacaacccaaataattttggcccgtttacataagcccaatacccatggtctaacctaaacaatcagaaaacagcaaaccctaggctacccttttgcgccgcagtctccattcgtcccacgtcggcacgccaagcacgaccccaggcccgcacatcgcgagccccatgtccatgcgcccttccacgtcttcacgacctgcgatttgagcaaaagaatagcaagaacctgcttgtatttggctataaagccttcaagttttgattgtaaagggggaccttttttttttc

SEQ ID NO: 16022 - DNA, 352 bp, Gossypium hirsutum
  Clone ID: LIB3829-034-Q1-N6-C9
acacacaaattagcagtctttgcatacccatagaacagagagaatcatacatacatggcaaatgttatttgtcaggcagatcagagagagggtgtccaggtttaggaaacatcaaaactgctgcccaagaaggcaatagggaaacaagtggacagatcctaccatgagacctgtttaattgtacacttgctatccacacctaactccagtggcagatcagatgtattcctctgcactttgtaacttacaataacagagctagattcagtttttatcaaatatatatatatataaggaatcctatatgcttagctttacgcaacatgagctggagcttttggttggatatctt

SEQ ID NO: 16023 - DNA, 544 bp, Gossypium hirsutum
  Clone ID: LIB3829-034-Q1-N6-D12
gggggggggtggtgtaataagacctttattttacccaatgagaaaaaaaagaacatggagaatcatgggacatgtgatataccagtacataatgattcctcctagatgttactagataacttctgctcacgtgtgggcactaaaggagacctgggggctgggatcctacacaagccctacacaactatgaagttctatccaagccagcaaattctgagtgtgactgatcaactcataaagcctcctccaggcatgttagatggggcctgcgatgaaacttgcccttgagaaactaattgtgatcggcctgggaccttggacataagctgaatttattcctgatccgaccatttgttgttgctgttgaggcatctgagcaagctgtggctgctgctgcaactggggcatctgctgttgttgcatctgggagagttgctgctgctgctgctgctgttgttgcagctgagggagttgttgctgttgcaaatgtgggagcggctgttgctgctgaggctgttgctgctgctgttgttgcagctgtgga

SEQ ID NO: 16024 - DNA, 499 bp, Gossypium hirsutum
  Clone ID: LIB3829-034-Q1-N6-D7
gcctaagtgggaagttccacggctccgcaatccatattgtatcagttgtgagaaatgatagataaagcaaaatgaaaaagaaagaaatcacatgctgtattctaattgtacttaaaagaaaaacccagatttttaattctatcttaatactatgattaacttaggtatttgtcaaataaagccttggctatagtaaggaaatttccttgggccttcactgggtacagctcaaggcctgcttgccacttatttgagaatgatatccactgtttcctccattctaccaatttgaaactctcatttttctctaagcttttggacaaatagctaaaatagcttgaagctcgtggcaaatagtacccttccagcagtccactccaaaacttgttggcatagtcatgaagcttgctttgattggttggtgtggtatcaaaccacattgtcacttgcgttctagcattccattcatactgtctcatctcactcgggttttctgcca

SEQ ID NO: 16025 - DNA, 507 bp, Gossypium hirsutum
  unsure (1)..(507): unsure at all n locations; Clone ID: LIB3829-034-Q1-N6-D8
gaacagcaaaacaagtgttattgataaagaaggatacttcanaaagcttacaggagactgatcaaatacgacaatacagtttttcatgtgtgtaattttggatgagttttattttccttatttaagagaattaattcaaagagtgaagcagaggacttggtggtttatccaaaagtgctgcgaatcccagcttccatgattgattgctgagactataccctccatccagtggtaagttgacaccactgataaatttagcctcatcacttgccaaatacagtgctgcatgtgcaaaatcttcaggctccaatacagtgcctttcaacactgctgaagccgcaatcatctcctctcccttcttcttatcgggtatcccaattgatttttggaacattggagtcgaaattgcatgaggtgaaatagagttgactctaattccatgctcacctaactccacggccaagctcttcgtcaaccctgcaacggcatgcttcgatgccttgtatg

SEQ ID NO: 16026 - DNA, 526 bp, Gossypium hirsutum
  Clone ID: LIB3829-034-Q1-N6-D9
aaacctacgttaataccatgaaataccatatttaggttcttgtttactaccattttcaagtttcaatccaatgagtatcatgaacagttgaacatcgccatgttgataaaaggactaaaggctaaatactgaaccaaattaggtaatgcaggacatccgaaccgatctctgctgaccataattatgtgataacgaattgcattaaagtgcaattagatcttctaaatacaagcagcaaggattgaacatcattcttttaaggtttaacttaacagaaatggaagaccaattataaaaaactcatacgtttaacttttccatttccttcctcagtgcattggctctcaccaagctcccaatggtattcactgccaacttgagatcctccagtggatttccgggtgccactgtcttgtacaagtaactgtcaaatgtcatcttctgcacatactcatccgcgcacatctccacgaaagcttcccttgcagggttcgatctgtagaagaccttctgcaatacatctaat

SEQ ID NO: 16027 - DNA, 307 bp, Gossypium hirsutum
  Clone ID: LIB3829-034-Q1-N6-E11
gttcatcttcttccttttgaggataatcaagtagaaaaaatcaacttcctgatcatcagttgggatcagctgagaagtgtactataatagttgtttaaagggggtggcctttttggtactaaagtgggattataaaaatcttttttgtggatattaaaaaaaaaaaaaaaaaaaaaaaaaaaaaaaaaaaaaaaaaaaaaaaaaaagaggaaacaaaaaaaaaacccaaaaaaaaccgaaacgcaaaaccacacccgggacaaacccgccccgagcccaggacgaacaaacctttacgggggggggg

SEQ ID NO: 16028 - DNA, 571 bp, Gossypium hirsutum
  Clone ID: LIB3829-034-Q1-N6-E12
gtgtggtgggtggtttttactaattgaaattttaaaatcacccaccgaatacaaacaaacatgagacaaagtgtattcgttcaaattcgattcatttataatcctaagtttaaacataaaaaggggggtagacaaaaatttaaaaatccgagacaggggggggggggaggaaatctctagcataagaacagtgaaggagttgggatcatttgatgagaatgcgtctaatgggcgagccttcagaaccaagcaaccttaaagggagcaatgagcattatatattccaactggaacgtgatcaagtttcaagccctccactagaatgagttccctgccttcaaagaactcaagaggagctggaacggagtgatcatagcatgcggcagataagaaatcgattcctacaaggttgatgtgagtgtgctttgccaaccatcttgcgccatctgtggggaatccaacataggtcgaatcaaactcctttttaaacataagccggctggcgggattcaatgttctgaaaagaacacgacgcactcctttgggaatgtgcaatgagtccttcacttta

SEQ ID NO: 16029 - DNA, 512 bp, Gossypium hirsutum
  Clone ID: LIB3829-034-Q1-N6-E7
attctaacctagccagtcgagcaacatggtaatctttatttccaggcacaaatggtaaaccgtttccccttatgttgattcacatcacatacgaagttttttatgggaactggatccttttctgagattttttcaactttatcaaaacagtacactgtctaaactgtttgaagagaattaaggattcagaaaatgtacacacaggcaaatgaagtcagcagtgtggtcagtagtatcgagacgaggttcaccgcattgttgtcaagaaagttaagacctgaaatcctcttcactgttggtccaggttttccaacaaccttatttcggacagagcagaacccactgaattgaagggttgctcccaacagagaatctatgatacttcctaaaagcccagccactgcagaaaggggtattaccaacagctgcttcatgcccatttcatttgaacatcttgtagtgagaaatccaaccagaaaaaagttaaaccaatgacactccctgctgccaaa

SEQ ID NO: 16030 - DNA, 539 bp, Gossypium hirsutum
  Clone ID: LIB3829-034-Q1-N6-E9
ggcaggaactaaatggtacctaaattgtctatttaagtcgaacaaatttacaaacttgtcagtaattttggaccataagcctcaaatgcaaaacttgcatcattacgcacatgtatccttttggtaagatgcatgcatttgcatgaaggtaaacaatttcaaaaaaaaaaaaaactcccaagttttgagttgcattggtgtatgattactgctactaacagaaatacgtgagggcaaaatggaagaaaatactactccatagtgaaatcttggaatgccacataaccccaggaggcaagcaaatcggttgccatccactatatgtgtgattatgcatttataccgatgaaataacatcccggcatccacttttcgccagcaattctatgtttcaattagtgggactgtgcttcaagaaaaatgtttgtggcagcattgatgtcatttctagcatgcacaagtgcctgcctagctgagttctgatcaaagcccatagacaccagcgtagcaacagcatcctccgatggctctatggctga

SEQ ID NO: 16031 - DNA, 519 bp, Gossypium hirsutum
  Clone ID: LIB3829-034-Q1-N6-F10
gcactacaattacagcttatttaatttatgtttcttgcaatttggcagtctatatcttagtcaaaaaccctgcccgtcaggtaaaaatagttcaaacaaagcaaaaaagcctctgtacaattctttatgatttctttcttggatgcttgaattaaaaaggcttctttctttaatttgtgcttgagtattttggacctgtcgttagacctaatccaactgcctctgaacttttcattaaccttaagcgtttgcaagattcaacaaacatttgccatggtacatctcccaccaacatccaatctccgtccttatcctcatatgtaggcatatactcaattccattcacttgctctattttcttctcgttcaaatagtttcttatggtgaaacatgaaaacatgtcttcaagggaggttaacagctgctgataactattgtatatctcgagatcaactttccttaaatatggagcaccgtccaccgccacttttacatatttgcaactcttctttcctctct

SEQ ID NO: 16032 - DNA, 442 bp, Gossypium hirsutum
  Clone ID: LIB3829-034-Q1-N6-F11
ccttcaaattacaattacatgcgaaaggaggaaggatgagagtgtcattgatcaaacacgatttattacaaaaaggggtttcccatccatcctttcctttcaccaaatacagtaattaataattaaggaaggcaaaaaaaaaaaaaaaaaaggagccctaacaagagggggggcaaaaaaccttgtttttgctcccctctagttcttttatgcagggaaaatcccatcccaaaatcatcaaagacccaacaatttaacacccatcatctcatttaaatcttctatttacaaatccaacactacccacactattccaagggggaactaaattttataatctccctttttcctttaaattttttttttctaaaatcaaaatttttttcccctcgggattttttaagccacggggggaattctgcgagggcggccatttttgggg

SEQ ID NO: 16033 - DNA, 545 bp, Gossypium hirsutum
  Clone ID: LIB3829-034-Q1-N6-F12
ggggggggggtttttttttttttttttttttttttttttttttttttttttttttacacgcaagaaggaaccttggggctaccattacatcaaatactagtttgggtgaaaacatcatagggggggcgtgagagtttttgggacatatgcggggggggggggggttacagatacttatacgaggtggcgtttccacaattaccccattatactctgggaatacacttaaaaatcttggggctacctatttaaattccaaacttttggggcatcaatcgggttcttcacgagcaggttgggggggaacttggaaggcccaacaactccgggcctttgagacgggggggttcctcgaacttgttcaaaggaatgggctcaaatgggccactgggaggaattggtccacacaaatcattggttgagacgtcgacaactttgaggggtgaaataccaacaagctccctagggagagggccagttaacctgtggtcattaagccggaagaatacaagagacttaagtttccccagggaaggaggaatggg

SEQ ID NO: 16034 - DNA, 517 bp, Gossypium hirsutum
  Clone ID: LIB3829-034-Q1-N6-F7
ggtcgtcaaactcatcctttttacaaggactttcaatttaaaagaaataaagaagaagaaaaaagtcaaagcctcaagtacaactacattaaattttctagaagacacttaaaaacacacacgattatcaaactaacaaacaccgtgcaaattctacaacaaaacaaacaaataaacataaagtaaatagtaaatcaccactacaagttaaaaaccgttgaagagaatactgtttaatgtccaacactgacttcagtgaatgcggaagtcttcaccttaggcggacgtcccctaggcctaacggaggccgacatcatagttgtggagctggcagctattcccccttcgggtcgagccatcttccttggccttccacgtggtttcccactcccagaaggcttggggaacctaaggggagcgttggggttcttaggagggcggcccctaggccttgcagagcttaaaaccataccaggtggcaatgggaccttgggttttggaggcctaccacggccac

SEQ ID NO: 16035 - DNA, 531 bp, Gossypium hirsutum
  Clone ID: LIB3829-034-Q1-N6-F8
gaagaaaccttggcattcgcttattactactattaatttagtaataatttaacagatacatggccgcaaagcaaatctcaaaccaaacaatgaagtcggcaggtggctacattgacaatacaatctttaaaattattacaacccaagagcgaaaggaaagcctgtagagcttaaccaacttcctccagcaatgaacctgccaggagtaaaagcctgagcttcacttgcactagtgatcaccttgtaccctccccatttcactctcgcagaagttgaggcaccagccccggtgttctggtactcggcataaaacagtgttttcagggcgaaactcccgctccactcgtgccaaccagcaggttgaatcacgtcactgattgttgattgcattaccacagtcctcgagtactccttccagggcctgccaagatatgttggggaagtttttacgaacaggctgtaaatcagaagtggcacctatcctacatttctggatcacaatgcccgtgttttggttaggggtcggtcctg

SEQ ID NO: 16036 - DNA, 396 bp, Gossypium hirsutum
  Clone ID: LIB3829-034-Q1-N6-F9
aacaaaggccccaaagcatggaaatcaaaaatcaccttttgtcttaaggtgaaccagagaggggtaattggcaacaacaatgcaatattacaaacttttaagggctaataaaaataaaaatacctgctcaagggctcgaaataatttctctttgcaaacaaaaggaaaataaatgctcaacaggggagctcccaactagcctagataataccaattttgtttgcaacggccaagggatcgtattcggggggcaacctaacatatgctttctttggtccatcaggcctgatcaaggggttaacttttttggcctgaatatcaaacatttttttgacagcatctttaaacttcttcttatcagcccgaatggcaacaatgaaaaccaaagtgttgttg

SEQ ID NO: 16037 - DNA, 521 bp, Gossypium hirsutum
  unsure (1)..(521): unsure at all n locations; Clone ID: LIB3829-034-Q1-N6-G10
aaataaactttagnaaatttcacaattaaatcacacaaattcagatataagattagacatataaatttcaatcaaaaaaacatttaaagatgggttaaaaactcaaaaaaaaaaaatgtccaagttgggcaaaactatatatgaattacgatcctccctaagaaacagtcaagaacatcagcattcgatccgctgtcgttttgtagaggcatcatcttcttcaactgtgttctgctccttaatttcattgcttccttcgtatttcaagggccaaccacaaaagtcagactcgggaaacaaagatgttggcgttgctttataaaaagccaaaggaacctgctttacccgacgtcgtatctcgtccccaaatattgttgcatatgaaccagaactaaaatctttgatgtccatttcagtggttttggatcgaactgtcaaatcattctccaatgacaaaacaaacttgatacaggtgggcagtaatggtgtcgaagggtgtctatttcccaaagagaacttct

SEQ ID NO: 16038 - DNA, 453 bp, Gossypium hirsutum
  Clone ID: LIB3829-034-Q1-N6-G11
caaaaacaacccatactaaattgcaatattcagaaatgaggacaaaatatgaaaacccatgtcaaatttaaagagaaaacatgccattaacataataaaagggaaatccatgtgtaataacataaatccagcatccattgggcttaataaagcatgaccatacggcaaatatcaccaccatatcttaaaataaattcaaaaatgacaaaaaagaagaagagaaatttaaatcttatcgaggtcctcatcctcaaactcgatgtagtcatcgcctgcaccataattttcctaataaaggccgccagcaatcccttcattcaacctgggattctcgggtagctcaccataagctttgaaaagcctagcttcatcgggcatgtatttaaagaagacgtcagccttgtcatcttgaaaatccctaaggccgacaaggataatgtccccggcggcaat

SEQ ID NO: 16039 - DNA, 541 bp, Gossypium hirsutum
  Clone ID: LIB3829-034-Q1-N6-G12
caaatatactaattgggtggcatagacaaaatgatcatatgatttccatacatgggaagtttttatacaaaaagaaaagctaaatgctgcaaaccatttgcatcatattccgttactagtctatacaaaatcggcatatgagtatgaccgcaaatacggatgaaaatagacgaacaattcgagcttaaaccgaaccatatacgatgccaaaccgggcattactgactagagattgtgaaaagcaagccataatgatcacttggcaaaacaggaagttccaataacttcttctctttcctcacattcttctccttgggatatgataaacccggtattggctctactccgatcatctggaccgcacagactttaaaaccattcagcttgcatagaaatcgatctagtcgttttcgtaatgtacgatttgccgataacatctggtttgatttgggatcatacgtccatccatcttcagcaggccttaactcggtccaagcatcaatccatccatcagttaaagggaaacgaccatctaatttgg

SEQ ID NO: 16040 - DNA, 518 bp, Gossypium hirsutum
  Clone ID: LIB3829-034-Q1-N6-G7
agaataagtttggagtgttataacaatccaagtcaattaatttaagagtgacagcattactgtaaaaagctaaaaaatgaacctgaatgacccctctaatgtcattgggcacactcaccaactttattcctaactcttctaactgatggaaaaatttagtatttttatctccctgaaacatttttgaagccattccctttcctcccttgcgtacaaaccccacaatttccacgtgagaattaacaatatcattgctaatatgatctgattggactagtttttctaagctattaattccttgttcgatattagagatagacacggtgtctcccttttttccatcttcattgtcactctcattgatcagttgacagttgagactagtatttgaagctcttcgcagatcgacgttggtacctaattatcatgtggtatcattgctctgtccctcaaaacgggtttattaacgcccacacttgattctgatcttgtctaatcggcattacaatatggtcgtg

SEQ ID NO: 16041 - DNA, 416 bp, Gossypium hirsutum
  Clone ID: LIB3829-034-Q1-N6-G8
gggcactatcccaacgaccggatcatcaaataacaaacaatatcaatcctaggggggcccccaaaaaaaaaaatcccagggtagaaaccaaatacatagggaatttgaaaaaaaaattccccaaatcggggggggggaatatatatatacccaaaacaaacatgcaaaaaggtaatccaggataaagggggacctaaacccaagcacttgccaccccgggggcaaatcccccaccaaaatgggtagaaggaaccccatatccactaccactattccctcctccaccggggaaaaccaaattcttaccaaaggaactttcccttctgaaaaacccccaccaaaacccccccccccaaaacggggacctttggtacccccataaggagcccggggagcaaaacgggggagccaaacag

SEQ ID NO: 16042 - DNA, 537 bp, Gossypium hirsutum
  Clone ID: LIB3829-034-Q1-N6-G9
gacttgataatcataaactatatgtatcccaatcgaatctaggttgtgagaaaacctcataatcaatcggtccatcaataatgctgtctatattttgcatgccttccaaagggctggttgaaaactatcactatcagaaggtaacagtttgtaaattactagcaacccaagagtaaatatggcttgcagctttgtggagtctcctttgactgaaaagaacaaaagcatcgagatgaggaacaagtcgaggcagaaccgcatgatactcaacacagtatccatcagccttccatcattgccagcaggaaatccccggactctatacacaaacagaaaggtgtacttatcaaccacatacctatatccaaaataaactgcacccactggcaccacgagtggtgcaaatgaagaatatatcaaggtcagggcaaatattgtcaaattaaatgcataatactgcgcaaagtcaaatttctgcttgggtataggtgaggtccggctgctgataggatagacggaaagatcctgtcccggaat

SEQ ID NO: 16043 - DNA, 518 bp, Gossypium hirsutum
  Clone ID: LIB3829-034-Q1-N6-H10
aattctatgcgcgatgctaaagttgatgagttgattgacagtcattacagaagttggaaaaagggttgattaccagtaccttttcgggaagaggatgccaccaaaatcctcagaattcctctggcacaaacacatcgtgaagactttcttatctggggtggggaacgggcgggtgaattcacgggcagaagcgcctatcaactattacaaatattgactaaaagtgcttagaacttatgctttacagaccatctataggaatttttacaaaaaactttggagcctaaatctactgactaaaataaaggtgacaatatggaagttatcttggaattatctgcctacaaaggtgaatttacagcaccggaagttagcagtcaatccaagctatccccgatgtggagaaggagctgaaacaatgaaccatttatttcgcgaatgccgtgttacaatggaggtatggagagcattatcgttccagaacattttgatgaatcaatgtgaggattttttacagg

SEQ ID NO: 16044 - DNA, 533 bp, Gossypium hirsutum
  Clone ID: LIB3829-034-Q1-N6-H11
acgacgggaatttaaccaaaatccaaatccttaaatataatgttaccattaaaaatcgaaacccttggaaaacataaaaatgagatgaatcaagtgagagagtgctcgtctctgtatctcataaaatggggattaaattcatctattgacaaccgccatcctcacctcatccacgccacctccactgaggctttttattattatttttcctgcaaacccgcaaaaccacccccttccattttcgaccattttcaaatttatgcttaagaaaggcttgcttttagatctgctgcaacagcatcaatgaactcctcagtattcaggtacttgtccctagcaagcttagagccgtgaatgattagtgcaagatctttggtcatctttccagattccacagttccaatacaagctgcctctagtttctcagtgaaatccaagagtttaggagttggatccaattttgccctgtgtgcaagcccacgcgtccaagcaaagatagatgctatgctgttcgtgctggtctcaccaccctt

SEQ ID NO: 16045 - DNA, 535 bp, Gossypium hirsutum
  unsure (1)..(535): unsure at all n locations; Clone ID: LIB3829-034-Q1-N6-H12
gtgtgggggggggggggaaacctaaatttttgtgtgcaaaagactgtgtttagaacagttaccacccacaaaattatgcatttccaccacaaaatctagagggaccatcgaaaacttgtttgaaaattcgagtccaaatgctangtagtggtctgtntggggtgnaacaagcctagatacaggcgtgctaaatacagatacaaccaaagaccttatctatacatttaacactttctggagttgtccagttatatcatctacacctacttcagtttctttttcagttacctctgctgtcttcatcttttggagctctgcattcagttcagcaatctgcttttctatcttggctcccttatcaggcaacctcaaaattgtaatcttattagcatatatttgggacagccggttaattctttgtttaatttcactctcagttaatttagctacttcaataggcgacaagcttttcctgctcatcatgatatcctttggcttgaaagcatatacagccccatcaggtttctgttcaaca

SEQ ID NO: 16046 - DNA, 502 bp, Gossypium hirsutum
  Clone ID: LIB3829-034-Q1-N6-H7
aattgaacccattcttttaagcacacaaacgacagaccttggattatcatgttcatcatcatctattttgttctacttgtggaaacacataaactaaaacacacacacacaaaaatgaagttgtcgatcaaggccctcttgtaataagttaaagagacctgcgttgaagaacagtactgatgttggttcgttgtctcttaacattccctgaagaattagattcatccccacaagtgctcttctccatcaccggtttcaatgcttcttgtattgaaccaataacgtcaccaccatcactgctacagctcgattcttgttcctctccggtaatgaagagtacattcttgacacgcccgcccagcgtcgtgatctcagctttcagtgttttgagacgtaaatctttcaatgctttgattaggtcaggcaaaagatcggacctatcttcacagcaaagcgaagcttttatcacgaacttaccatcttggtccgatgtatccaccgt

SEQ ID NO: 16047 - DNA, 511 bp, Gossypium hirsutum
  Clone ID: LIB3829-034-Q1-N6-H8
gaaaaagaatgcgttttatcaccaaccgtgtgtatccaaatccttctgcaataacaaagtttatgctacatcagtcttttaaaggggtaaatgcatcaccaccagcaataacggtactcctcagtagcaacaatggccatttcatccatcagtgcacgccatttaggctttggtgaaactggcggatgcataccatgctcaagtgtggcagctgtaaaacgctagagtgttctaaagcacaagtgctcctccccaaacgattgcttaataacttcagcttgaactataacacgaagtgatccgtgaatagttttaggtggttgagataataaagcaagatgagttggaccacctccttttccaacagtcccaccacgaccatgaaacattgttagcttcattccaaattgcttagcaacctttataagctcctcctgagctttgtacaattgccaggcagcaaagagacccccagcatctttacctgaatctgaatacccaatcataactt

SEQ ID NO: 16048 - DNA, 499 bp, Gossypium hirsutum
  Clone ID: LIB3829-035-Q1-N6-A10
gctctaagtttatctcataatacattcaactgaaagttacatctaacaactgtttcaacttttaaactcaccaaaaaaaaaaaaccaactcaaataaaaatattaaaaaagagatctgagtgttatatctcgggggtatacgtggatccatatacacccactatacatcactccaatttacaatactacccctatttcgactagcctcccttctcatttctttcccctcctcgtcgtagctttcttcgccggggatttgacacttttcggcttaacactcttcgaaggagcctttttaggcgcggcagccttcttcggagtagctttagggacagcccccttcttcccaggagaagtccttgttgaagtcctcaaagccttagccggcttttcctttggcttccccttcgatttagctacggtttttggcttaacaaatgcactcgccttcggcttcacagcagccacagccttcgtcttcgttgcgggggatttagcc

SEQ ID NO: 16049 - DNA, 461 bp, Gossypium hirsutum
  Clone ID: LIB3829-035-Q1-N6-A11
caaagttctgatataatattgagaaatgagagaaactacaagggacggggaagacactgcccctttctacgttttccctttttaacaaacaaatactgtcaagggaaatgaaacaaacagaaatttgggacacagtaagttaacaagctcttaccatgtcgcttctcacttgtacaagaattttatgataaactgccctttcactgcaagctacaaaattcacagattcgacgacatacctatgtgcagttgttaattcctcaaatagatcagctaaaacttatttttatactatctgtcttcatccataagttacttaaaaaccaaatccaagcccagtttcttgcttctatcagtgaagttaaaaattgcgacccatgtgagatatcattatcaactttaaccctttttatggtattagcataatagttccatcttcttggggattggagaggtcagta

SEQ ID NO: 16050 - DNA, 495 bp, Gossypium hirsutum
  Clone ID: LIB3829-035-Q1-N6-A12
tgggggttttttttttttttatgaggaatcctcttaaaaaacaccacattaaaaatgttacataaaaactttaaatgtaccatccactcttgcagtgtgtacaaataaatactacaatctaaggccacaacaaacctaaaaccgggggggaaggcataagtgctgcctagttaagataaaaatcccactagtgagggttcagttctaggagttggaattgtctataatatattttcacctgggttcatttcttcaaaacctttttaaatgagacagtggcacatacattaatggaggaatggcaacaatggtagacattcatgccctccctagcttcaaaaaagcatttttgggaacagaagcacaagactaaaagatttaaacccacctaaaaatctgacagttctttaaccaccaaaccgagcagtcgcaacttatcatatatgaagaacagagagggttcctttttatgattctgttgaagcatcatcacct

SEQ ID NO: 16051 - DNA, 521 bp, Gossypium hirsutum
  Clone ID: LIB3829-035-Q1-N6-A7
ctgctatggagatttgcttttttgtgttattgaatcggataaaagttcacattacatatgtgtaaaactagaatactaatgaaatagcttttaaaactgtgtaacttcatcaaataaggtataaaattcacataatcaattttagatcgagtccggattaaatgtttggtggataagaagttgagccgcttcaaccagcttctttacaacttgtccggcaggtagaatttccttgatgaggcctacactttggcctgcgtacatcaccatgctttcaatgtcacctgttgttgttgggttcggaactgtaccggcaaaacgccgaatttctctttccacgccgtgtattattgttcgaccaatgataggctgattagtttcattttcttgagcattaaggcatttccaatcacagaagaagggtgtttgaaggacacggtgtggtgcaccaggccaccttgctctgccaaagacatctgtatactcggttttatcgtattcaatcagtttccgcttgtacg

SEQ ID NO: 16052 - DNA, 517 bp, Gossypium hirsutum
  Clone ID: LIB3829-035-Q1-N6-A8
gactcgtaaattggcagcaaactttattcaaaaaaatgaaattcaaaattatcgttcaagattttgatgtttgtatataatactgtcaatgtacacttcttaatttgaacatctatggaactgtcaggatctgcctgctgaactttttgtgtatgaagaagggttggaacttggaagttgcgagtcgctacaaagacagaaggagccaaagattgaagagaattaaaacaaaggacagaagccgcaacatgaaagtcatagctgcagacaactgatatctactgcatatctttgacgggcaatatgtagagctgacattgaccaaaagacttgtcacactagcagttgagcaagccgcggctagtgagagaaatgacaaggcctacgacaccagaaacagctacttcaacttccccgcatcctccaggacctttcatgcaaagtctgtcttttttgccagaggaatgacccattgatagaagacttccaaatccagaactcccaacatcatatgcat

SEQ ID NO: 16053 - DNA, 530 bp, Gossypium hirsutum
  Clone ID: LIB3829-035-Q1-N6-A9
aaaacctccatttccttcaaattacaattacatgcgaaggaggaaggatgagagtgtcattgatcaaacacgatatattacaaaaatgtctctcccatccatcctctcctctcaccaaatacagtaattaataattaaagaaagcaaaaaaaaaaaaaaaggaaccctaacaagagtgggggcaataaaccttgtttttgctcccctctagttcttttatgcaaggaaaatcccatcccaaaatcatcaaagacccaacaatttaacacccatcatctcattttaatcttctatttacaaatccaacactacccacactattccaagttgtaacttaattttatcatctccctctctcctctcaatttttttttctcatatcaaaattttcttcccctcggtatttcttaagccacggcggagattctgcgatggcggccatctctggtgaggcaatcaaatccctcgattcgtacagcagctggcatctgcccgaatttcaccctcacgcatcctccccttgaggaggg

SEQ ID NO: 16054 - DNA, 528 bp, Gossypium hirsutum
  Clone ID: LIB3829-035-Q1-N6-B11
cttaagagcatagtaattcacatcaattgcaaagtacaaatacaatccacttgggaattctcaacctttggaaaactgcagtcctacaagcatctctgtttttgtcttcctgttcaaactaaaaggcgactctgtttacttgttatttttggacttcaattcagcagcattagcctgtgcagcagcttttgcaagagttgtgggtttgaagacactcttgggattaagagcctttctaatcttaaacacagcccaagctgtcccaattgcatgtcctgccgcatcaagcccttcatttgtaacctttcctgccttttctccatacctttgtgaaacaagtcctgttgtcaccacagatgtggtagacatgacattccttcctgctacttcaactgcatcgcaaaccttattaaatccatccaaggaagcaagaacgatttctccaggcatcaggttgaaaaatttcttgccaactttggagttaacaattgaacctgtgaagaatccagacactttaaccacacctga

SEQ ID NO: 16055 - DNA, 525 bp, Gossypium hirsutum
  unsure (1)..(525): unsure at all n locations; Clone ID: LIB3829-035-Q1-N6-B7
ataggtccaaaattaatatcaaattgaaattatggaatctgaaaaaagattacataaaccaaacaatccctcgtgttcttacaaatctataacagtgtaaaaggttccacaatatagacatgatacaccagagaaatgtacaatgcacaacaccagggtaacccaacatgccaagaacaaatttcaaaaccatgagcaacttgctgtcaaccatgctcctcacaaagatgcaaaaacaaagaaaaatgaacaagtgatttgcccaaaatttagacaagaataaattaaatcatagtacgagtaataccctcagtcgcagaagggtttaaccttaaacctgtagagaagcttcttcttttttgaagttgggttgtcaacagttagcaatacttancccagttcaccaactttaaagctttgagacacaactggttcatcttttgcagtcatcttggtcggtttttgaataataaccgcgtagctatctttcgcatcaggcacaaattcagctccatagctcacctc

SEQ ID NO: 16056 - DNA, 523 bp, Gossypium hirsutum
  Clone ID: LIB3829-035-Q1-N6-B8
aaaaagaaaaaaatcttattcatagcaatatgttacacatccatagagatactcatcattacagagccaaagtaagaagataaaaatgtacagttaactaaggaatagggtcacaaacttctcaagtgtgcagaaatctgtatgtttttcattcatgatgataagctgtcttgactcttagctgataaccgttttaagaactcataggtagtgatcatgggtgtggcagacatagacattgatgcccaccttggtcccagtcccctgtaacaagcaaacaatccgccttctttaaccaaattccttattgtctgcaaaaccgtcataggacttcttaccccattgccttctccatccaggacctggaacctggttttgatggtgtcaagcggcatagtgattaaagctgaaacaccactagccatggctgcacttaaaccttggactgccaccacggcccttgaatcaggcttgaaaccagatccttcaatcacaccagcttcatcttttttacccatggagc

SEQ ID NO: 16057 - DNA, 519 bp, Gossypium hirsutum
  Clone ID: LIB3829-035-Q1-N6-B9
aatccaacacagtatcaaatatcattcatcgcaaaaccgacaaaatatgatgtgaatgaaccagctattcaagctgcatgaataatggaaatcttttaaagatgtaatccagttagattacatagaatccgaaattacccacaaaaacaacccctgaatcaatacaaattaaaaaagaaaattaagcacgctccccacgaattcgcctagcgagttgaatatccttgggcataatggtgaccctcttggcatggatagcgcacaagttggtatcctcgaacaaacccacaaggtatgcctctgcagcctcctgcaatgccaggaccgcatggctttgaaacctcaaatccgtcttgaagtcttgagcaatttcacgaacaagacgctggaagggtaacttgcggatcaaaagttcggtgctcttttgatatttacggatttcacgaagagcgacggttccaggacggtagcggtgaggcttcttgactccgccggtcgttggcgcagatttccttgcag

SEQ ID NO: 16058 - DNA, 507 bp, Gossypium hirsutum
  Clone ID: LIB3829-035-Q1-N6-C10
aacaataaagtatttccatgataatcaaatcaaaagtacgatcatatatacatataaaggttgtgaaatcattctggaagcaataaagtatatatggtacctaatatgaccatttgtcctgagagctctttagtgaacttcgtaaccctggcagaatctgtagttcttgtgcccattgcagagttctggacttcatgggcagcatcctcattcttcgaggatgaagatgttaacttattaacagttgtattaccatcacaattatttgtatttctgacccctccctaaaagaaaggaatgcttttcagttactaaaatcacgaacctttaaagaagtctaaagccacactagtacaagactaaatcatcttcccgtattgtcgtaatagaatacatgaaagatactacagtcactctaaacctgacctccatggatgtgtccatgtcatcacttgtaccagcatcgttctgtgagaaccttctttgacaactagggagatcattctt

SEQ ID NO: 16059 - DNA, 526 bp, Gossypium hirsutum
  Clone ID: LIB3829-035-Q1-N6-C11
atgtacaaaattcactggttccattcatctattatttgtatgtttctttgcttccttttccatacagaacaacaacgaaacagtcacattcacattcacatacttcctgggcattctgtggctgccaactacactaatatgcgacatttttttttctttacacttgagatctttctagttctctgtcttccatgctttattattgtatcaccaactttattccctgcctccaacatcatcatcatcattccgttggaagcccattctgagtccacgccgcgtaccctccggcaatgtcagtaactgcagtaaagccagcagctagaagctcggtggctgccatcagagaccgtttcccaagttgacatccaacaataatttcatcatattttcctaaatgtgatgatacttcagctacaaaactggggttttttgccattcctgatccaactttgtacatgtaagggatgttaatggccccagggacatgccctgcactgaactcttcaggagtcctaacatccaa

SEQ ID NO: 16060 - DNA, 119 bp, Gossypium hirsutum
  unsure (1)..(119): unsure at all n locations; Clone ID: LIB3829-035-Q1-N6-C7
gtgtattttattatactcgttacgctgtgtggttttnacntcttggtgtaatttcctggtatctggtcaccttgacaggtcgtcaccagtctttatcgtaatagatgagaacggattat

SEQ ID NO: 16061 - DNA, 517 bp, Gossypium hirsutum
  Clone ID: LIB3829-035-Q1-N6-C8
acatataaagccgatacatctacagattgctagggctgcagatgttattgaatgatatgtaatttttctgcacataaatgtacacctatgaacaaaggataactctagttcataatataatatggagatgtatggttttcctagtcaaggagaagctatgtagaagtaatgcaggttgccaactttttacaaagttgttgaatgtcaaatgatggatcattcaaagctatatcagaaagtacagattgttagggctgcaaatgttattgaatgatatgtaatttttctgctcataaatttacacctatgaaccaaggataactctagttcataatataatatggagatgtatgcttttcctagtcaaggagaagctatgtagaagtaatgcatgttgccaactttttacaaagttgttgaatgtcaaatgatggatcattcaaagctatatcagaaagtacagacctcgcttctactaatccatgagaatatactctccaaaattggatcttcactt

SEQ ID NO: 16062 - DNA, 473 bp, Gossypium hirsutum
  Clone ID: LIB3829-035-Q1-N6-C9
aaaacaaaccggccattaaataattgataacaagctatcaaaagaaacttttaaaagttttgggaaacattaaacattaaaacaaaatcccaaaacattttaaactaccattaccagaccatcctaccaaaccaacagaccaaaaggggtaaaacgacgggggaaaccaatcatcctcatagcaataacaaaaaacgggggaaataaataaccaccaaaacgggaaaccctccctttctcccgctttttccaaaaaaaatcttaaaaaccacactccgacaggagcaattaatttctacggggggttgcattccgggggcctttaaccttggtgcccatcccctactggtttaccactctttttaagagccgactttttttggggcttacttccttgggaaacatcctaaacctaaaggggagaatcctaaaccttttcctaataatccttttcctaaaaaaaaaaatgggaa

SEQ ID NO: 16063 - DNA, 544 bp, Gossypium hirsutum
  unsure (1)..(544): unsure at all n locations; Clone ID: LIB3829-035-Q1-N6-D10
tcgcggacctanagaaaattctcaaatctcctcctcctcctcagaaatcttagtatcatcaccatggcctcaatcccaaggtcttctttgacatgactatcggtggtcagcccgctggtcggattgtgatggagcttttcgcagattgcactcctcgcactgctgagaacttccgtgccctctgtaccggcgagaaaggcgtcggccgcagcggtaagcccctccactacaaaggctcctgtttccatcgtgtgatccctaactttatgtgccaaggaggtgacttcacgggcggaaacggtaccggaggtgaatccatctacggatccaagttcgctgacgagaacttcatcaagaagcacactggtcccggtattctctcaatggctaacgctggtcccggaactaacggatctcagttcttcatttgcacggctaagactgagtggctcgacggaaagcacgttgtgtttggacaagttgttgaaggcatggatgtggcgaaagcccattgagaaagtgggtctagccaggggaagaactt

SEQ ID NO: 16064 - DNA, 528 bp, Gossypium hirsutum
  Clone ID: LIB3829-035-Q1-N6-D7
gtatcaaacagctcataataagcttaaactttcatcatttctgtcaaaagtaaatttgagatatggaacaaggtttcagtaaaagtaacaacatatatctaatagttgacacattcagcacatataaataccttacgggagaaatcacacatattgtagccttctaaacagcatccaccatatctctcttccaacattcaagcaaatcattcaaacaaaaccagctccataaccctatattttatcgatatcttcgtcttcgaactcaatgtaatcatctgcacctccttcatcttcctcatcgacaataccttcattaagacgagtgttctctggaagctcaccgtatgcctttaagagccttgcttcatcgggcatgtacttaaggatcacatcagccttgtcatcctgatagtcgcgaagcccgacaagaattatatcaccagctgcaatccaaaccttcttgtgcatctttcctcggatatggcaaaggcgcttagtaccatctatgcacatggcttcacaccg

SEQ ID NO: 16065 - DNA, 403 bp, Gossypium hirsutum
  Clone ID: LIB3829-035-Q1-N6-D8
ggggcccgggggggcccccggggaatccggggcggggcccggggggggccccagtttcccctaagggggggggtataaaagcggggggaaaaaaggggaaaaggggttcccgggggaaaatggtttccccccaaaaatcccaaaaaaaaaacggccgggaaaaaaaaagggaaaacccggggggcccaaagggggggccaaaccaaaataaagggggggggcccaacggccccttttcaaaggggaaaaccggggggcccacctgaaaaaaaaaaacgcccaaccccgggggagggggggtttggtaatggggccccaggggggttttttttttaaccagggaaaggggaaaaaggtgatggcccttaacccccgggccctaaaaaaatgaaaaaaggggccc

SEQ ID NO: 16066 - DNA, 500 bp, Gossypium hirsutum
  Clone ID: LIB3829-035-Q1-N6-D9
gttcaaggtcagcgcactgaatcaacacgttaactctatacatgttgaaatgcatgcatttgcaaagcttaatatttttaagtttatatacataattatgctgtttaagactttaagttcattctctaccattggaaccctaaaaacaaatgttaatatgttcaagcatgacataacaatctgaaaaaactaaacctttggttagacaggctacaaatgaattttttcctaccagttcacctacctgctgaaactggttctaactacaaatttcgctatggatttttttattcctatcggcaaccagcatgaatgtcatgcacctagattttccttgagtctcctctcaacagctatagcagcagccatggaaggaggcaggtatctcaaactttaactttcggtcttatacttcatcggtttttggcgctctggatggcgctgtggcgaaaagggattcaacatctttaagtgtcaaaacaggctggtcttgattcttg

SEQ ID NO: 16067 - DNA, 524 bp, Gossypium hirsutum
  Clone ID: LIB3829-035-Q1-N6-E11
gaaataatgtaatgattcatttatattaaattataaataagtgtgaaacaagactgaaataaatggtttcaacaattgaggatgtaccaatccaccactaaaaatagagagccaattcacctgctgctcttcctttaatctaatcctttgagctgcacagaaacctaaatcataaccagaaatgacaatcagtttcattcattcaaatccttcgccttgttctttgaatgaactcgatgcttctcctttttcccccccttgcctgatacacttttcttggaaaccttgcgctcggagggcagttgaacttgttttaacttcatcttcactgatctcaccatcgaagacaagttatgcttctcctttgaaggtaaaatatcagagttctcatgctcagctttgtacattccaggatcatcaattgagagctgaccatcagtgggtatttttgtgtcctctgcagccaattcttgccgttcacctttctgcagcttttttgctatttgtcgagcataagttgcact

SEQ ID NO: 16068 - DNA, 512 bp, Gossypium hirsutum
  Clone ID: LIB3829-035-Q1-N6-E12
gtgggggggggttttttttttttttttttttttttttttttttttttttttttttttttttttttttttttttttttttttttttttttttttttttttttttttttttttttttttttttttttttttttttttaaaaaaaaaaaatcgggggggggggggaaaaaaagggaaattttaaaaaaatttaaaaaaaggaaaagggggggtaaaaaaattttgggggggaaaaaaaaaggggggggggggggggggaaaaaaataaagggggttaaaaaaacaggtaaaggggggaaaaaggaaaaaaactttaatttggggggggggtttttgggttggtgaagggggaaaaaccccaaaaaaaaattttttttaaaaaaaagggaagggggaaaaaaaacgttttttcataaaaggggggaaaaaaaaaaaaaaaaaaggggggaaaaaaaaaaaaaggggggggaaaatttccccaaaaaaaaaaaaattttttgcggggggcccccaac

SEQ ID NO: 16069 - DNA, 500 bp, Gossypium hirsutum
  Clone ID: LIB3829-035-Q1-N6-E7
agcttaaagttcagcacactacactctttatgctgaaaaactaccgactattaagataaaagattctgaactcaaaaccaaaacaaaatacaaaggctcccagagacatgtgcaaaacattatggctctgctctgctacggtgatcacatgcggtggcaagtttctactgagatctaaccctgtgattcaacaacatctcccggagctccgtcggattgatctcagccccacaattctgcggccggcaataccccgtaacagggtcacggcgcccaagctgaagaataagcccttgtgtgcgacgacgactactctttcatcgcatctcttcactgcactttccccatcgacccaagcctaccaaagctagccggcactgacggcggcggtgcacccaagaaacctctccttgatatggagacataaagaccatcaaaaatggaagctccacagagcttaaaggaagaaacacagcgagccatcatttatttttacttgc

SEQ ID NO: 16070 - DNA, 490 bp, Gossypium hirsutum
  Clone ID: LIB3829-035-Q1-N6-E9
gggggaaaagggataaactttatgtagcacttttagaacacataattaagggggcaaatgttttaagagaacattcaacttaaaatgctaaaagggggaaacccaaaaaaaaaaaagagcccccttaattgggcattcaaacaatgaaagcgctcgcctagacaaccttttgaaaacgtaatctctcataaaaggaaatccgcgacattcgatggcagctcctcgatgacaacattgtacaacttggggataataaacagaattttttaatcatttaaagtcacaaagtttatggcaacaccttttttcccaaacctaccactttttccgattcggggggggtagttttctggttgagtaggcaaatcgtattttatgacaaggaaaaattgttgcacatcaataccacgggctaaaagaacggtagcgattagaacacgggcaaaaaccataacggaattcccgcatgatgacatcacgcgtattttgg

SEQ ID NO: 16071 - DNA, 521 bp, Gossypium hirsutum
  Clone ID: LIB3829-035-Q1-N6-F10
aaaaaaaaacaattattctattaaaaaatttaataaattattagtactgcatataaaaatcaaaactcaaatcgtatgaattgaacccatgaatcacatgagccacaaactagttatacatatataggccgaatggaactcttactagataagtcaaactgtttactccctcaagatctgttctttcaatcttccctttctccagttctcttctctgtccacacgaaagtacagtatcttgctgatgatgtacatgcttgcccgctgagaaactagaatagtaacaagtcagaactgcattagatgataaaaaaaactaatcatgctactctgagcaagatttcattcgatattgacggcctgatctctgggagatgtttctgttgtcaatgcttgtttgtggttcatcttcatccattgcacaaactccatcatcagtatccccagctgcaattccaatctgcaagcctctcctatgcataggcttcttgtcagcaccttctccggtttgttttgactcg

SEQ ID NO: 16072 - DNA, 501 bp, Gossypium hirsutum
  Clone ID: LIB3829-035-Q1-N6-F11
gggcttaatctggggaaacaggattttagaactcatgcacttttttacgggagtaaacaaacacaaatttcacatataaaccaaatgcccctaacaaaccgaaaaagtaaaaggcacaaaggtgttttgcattatcaaaaaaggggagcaaatgttgacaaaacaaccgcaaaaaatagcccttcacatcacttgctttaacggaacctgcaaagggaacaaatgaaaagggtggtcttaaacacccctgggacaatgccacaatgtaaaggttttcaacctaaacatcccatattgcatagccttaaattggttgtatcccacagcatttgcgcacactaagacagggcgagcctaaaaaggacgcatttgggaactaaacagggccgctaacctgtctccagaagatcaaatcgggagagtttatccccaattgcacaccaaaaaaggaacctcttgcattaatggaaaggaaccgcaaaataaacagggaccctccct

SEQ ID NO: 16073 - DNA, 454 bp, Gossypium hirsutum
  Clone ID: LIB3829-035-Q1-N6-F12
aaaaaggaaaaggggcaaaccaaataaaccggcccccctttttctcccaccaaaccccacagggggggggccccgagtttaaaccttgggatcccccccctcatgagtcccacctcacaaccccctagtactagaggtctgaccaacattaaagatcccgcttcttactttgggcaaaaccaaaaaccccgggggtttttaattaaaccccccgatttccccccccttaaacggggaggggttcccaacaaaccctttaaaaataaaaacctaaagggggcgggagccaccgtatcagggggtcccccccccagaggaggggcatcattgcccatcgggagaaaccccgctgatatgctggggccaaacccttaccataacccccgtatgcaggatagttcatgggagccccaggggataaaccaccaaggggggggggggccccttctgggga

SEQ ID NO: 16074 - DNA, 528 bp, Gossypium hirsutum
  Clone ID: LIB3829-035-Q1-N6-F7
ccaaaaccaggtattaaatataagttccatagaagtttgaccgcaaactgacactaatttttcaaaaaaaaactcgtacaataatagctattaacattaatgttctcaaaacccttgaatattaaataataaaataaaataaaataaaaaagcaccacaatccactctccagctccaaacatccttttaagcagcaacatggttcaaagatggattgtaaggaaggaattaagcaccaattgtccgcccaccgccatctccataggacccatcatcttaatggtggtgatacggtgaaaagctaaaataataatacgtcaatatcaagtacaccatcctacaatgatccccaactccccccacataaaccagactttggagttcacttgacaccgcacacaaaaaaagccaactaaatgcaaaatgtagatcaccatcaaaagcaattacaaaacttagaagcacttcctgtggacaatggatggaccggattcatcatactcacccttggaaatccacatctgctgg

SEQ ID NO: 16075 - DNA, 520 bp, Gossypium hirsutum
  unsure (1)..(520): unsure at all n locations; Clone ID: LIB3829-035-Q1-N6-F8
cgngataatcaaattataatagagattaaaatcgttttccatgactaaaaagggttcaaaatatgtgtaaattgaaaatctaaatcgaatactctgattgaagcttgcaagaactacatgcctgaaactggctttgtgggaacataacatagcattaatggttatcttaattctcaagtctttactagaccttttacagagactaacgactgggatttttaaataagaggtaagcaagacaaccggagagagtatagttttcaaccagtttcttgctcaaactcctcaccctcagattcttctgcattgtcagcatcatcatcatccgcatcattatcgtcttctttatcattatcagcagttgtcttcccaatcacaaccaaatttctgttagtatcactgatttcgttcaacttgtcttcgagattagattcttccatggcgaggaggagctcttcgttgtggggttggggccattgagaaggaagcaaaagtgacgacggaatagtcatcgtcgacg

SEQ ID NO: 16076 - DNA, 518 bp, Gossypium hirsutum
  Clone ID: LIB3829-035-Q1-N6-F9
catctcaaattggattatcctccacattcatgcaaccaaacattgcaaatgacacacatatctacatacaatttacattctgatcaactacatgttggaagaatactcaatagcagcactttttcgagtaatctttcaaaccacggcctttccatgcctcacgatatacagtcccaatgatgtctctgaactcctgtttgtccttgagagcccagttaatcttgttattatcgatgccaagatcaatcataatgtgcttgtttccttggacattcttgagggtttgattaaacctggaatcaaggctttatttgtgacgctaatcttcttcaccatggctgctgctgctggtctttcaaacccctcttcttgctcactccaaacgttcgcacgatagatttgttgaaaaactctcagataggagtagggaatttgaagagatgtgagatgggtagaaaaggaaagaaaaataattttttgtattactggaagcgttgaatagccacccacgcgtccgc

SEQ ID NO: 16077 - DNA, 526 bp, Gossypium hirsutum
  Clone ID: LIB3829-035-Q1-N6-G11
gactcgtaactcaatcaattattttataataataaagttgtgtaattagctctcaaattcaaacatcaatgcatgcatggcttcaaatcttgaagttcaatgagtaggcgtcttgttcagtccatgaactgcaatcttattgatttcataaaaccaacattactcaacatagtagatttagtagtacacaattataacaaaatataacatggtaatacagttcgagaacgtagatctcgagtataggactcaatttattatttgtaacattaatttaaaaccaaaaccaaacttttacttgtctatatgagcatgattttaattggaaactggtggtgagaggccagcaaagacatggagcaactccccgttgtcgatgtgccttgcaggatcggaaaaggcataaaggaagaactccatgaaatctaagtccttgaaaagccgaggatgttggtcatctataaactctttgggtgtcttgattatagtaccctcatttggaatgacgaaagctgctatagagtat

SEQ ID NO: 16078 - DNA, 525 bp, Gossypium hirsutum
  Clone ID: LIB3829-035-Q1-N6-G12
aataataatatgaatgggtaatgaacatttatgtcgagtgttacaccagaacaagagatcatattaccctcctatgtacagtagacgactgtggttcaaaataccaccgccaacttacaaagatttaactacaattggtgtgggagccctcaaaatctattcctttatttccttgggcatatatatgatagtacattgaaccatgatttcatttcaaaaataataaaataaaaaggtgtccacttgctctttggcattgtcaactctttcacccgctcccctaacgcctgtgtttgtatgtaattaatgcattacctaactgacaaaacacacagaaatctgaagccatatatgtcggcgaatgtgtcatttttcttaattttatttaacttatatatatatatgaaacggatttaactcaaaggggaaattatgcttcattattgtcctttaattcagagcaaacagaacatagcagcaaatgggatacagacgtaccatatctacttatgccatggaagtata

SEQ ID NO: 16079 - DNA, 564 bp, Gossypium hirsutum
  unsure (1)..(564): unsure at all n locations; Clone ID: LIB3829-035-Q1-N6-H11
gttggtttttttttttagaaccaactcccaattacatataaaacttttaaaaaaatataaagtacaaaagattgagcatngaaaaatcagagaagcaaatgcagtcaccaagagcttagttacaaacctgtttataggggcattntcccttntctaaatcagcgtaagggtgtcatcaaatgcgtaatgagaattaccaaacgagaaatactatgcatacagtgacacnncaaacccgaaaaaacagtaaacacaatccatttataaatatggaagtaaccttaaatacatcacacaagcctaatgagttaaaacacaacttaagggctttatattattagtgcaaggaatctatgttcttactcagctcttccagcttcttcatcctcaacctctcactttcgctcaccagctccattaattttgtgattagctgtactttttccttgttcttctcgttaaacgcctccagggcttccttgtattccctttcctttttctggcaggtgtggcctagtggcttcaattctttgttaactgcatcaatcttctttcggaccacag

SEQ ID NO: 16080 - DNA, 535 bp, Gossypium hirsutum
  Clone ID: LIB3829-035-Q1-N6-H12
ggaaaagcaaagctaccttcatttaaaaaatgaatatggagtttgacataaagacgccagtttacatatatgaattggaggaacccaattaaaggactacttcctcttttataatttaccaacaaacacactcttattgtgtcaaattcattcacttttctgcaaatctgtggaaaaaccataatagtttcttcttcttccctttgttttttcattgctccaaaaattagaagtttggaccagctgccaggatttcctctgtcaacttgttgtctttcccaatcttgtaattagtgaaggtctcaaagttcttcttgaatagcccagccaatttcaacagggtttccttgtatgccttcttatcagcccaggtgttctctggatgcaagatttcggaaggcactccctcgatctcggtggggatgtctagcccgaacacctctgttttatggtaagtcgcgttcaagaggctaccagagtggatggcgtcaatgattttcctagtgtagggtaacttgatacggtttccagaccc

SEQ ID NO: 16081 - DNA, 529 bp, Gossypium hirsutum
  Clone ID: LIB3829-035-Q1-N6-H7
acaatcaaagagaaaatcatgttaacaaagcgcacaaccaacataaaggccatgtctcgctcttaatacaaacggttatatgtacagcaaagaactaaaataaaagttaaatcctaacttctcatatggaaacagaaaagcactaaagtaccaagcaactttgtagcagaacatgccaaatccatacctgcaaaccaactactttgcatctcgcactacctgagtttcaaaaccaagagctttaaccacttacaatccacaagtagatgcagaattaagataaatctgctgattgaaagtgcttattggcaagtcaattgtactgctgaccaagttatacggcagattctttttcttttttggtaaaattacacagattccataagtacagtatcatatctaatatctagattcttaaagcacataacctagaattctaggccaaaaatggcgtaaacaaacaaattaacgaacagattacagcaaagtaaaaatttgctataatgaaagatggcaaaccttgcttgat

SEQ ID NO: 16082 - DNA, 516 bp, Gossypium hirsutum
  Clone ID: LIB3829-035-Q1-N6-H8
aaacaaggatatactaaagggtatttagataaatcctttcaggattaaagtagactgctacatcagtctgaaattgtatctctaaaatcattcaaaacaagttgcagaaacatatcaacagacacttcaaaaacctgctagactccatacatgtccataatctacccaccactaccacatggtactacttgtacgtaaatataaagcaccggacaaacacacttactgtttccagcagtaaccacgtgcatagagccatgagaaggcagcatcatttggaaagctgctagcgaggactcaaagatcgtgaacgagaccttgaaggactgcgaccgacacgccttgggctctttgacctgctgctcacatgatctctctcatcttgtagactctgaccattctccctaggactaggggatccctgcttggttctgtattccctgtccctgtcaccatgtggagaacgtgggaaaaagagaccgagaaacagatctagatcgcctgggagagcgataa

SEQ ID NO: 16083 - DNA, 520 bp, Gossypium hirsutum
  Clone ID: LIB3829-035-Q1-N6-H9
attcaacatatttagtaatatatttaattgaagaacagaaaataaatacaaaagacaagacgcatactcggttgtgaaagtccatagttaagcatatgatatgcctgaaacgtaagagaaacatggtaaggtaaggaggcgaatatactaataaaatcccccaatatggctgtgtgtgagatcacaatgacagaagagtgaaacagacatgtcggcttgaatctcaaaactgcagtgttacttcccaagcaatcggcgagctcgttgatttgcacctctcacacggaaatttagctcatccacatcatcttggagaccattcagactcttattttgcctctcgatttcggatcccatatcgacaggcataaccttcaactctcccagtaaatcgcttaaatcggagaggccgtcatcttgctttgccttttcaaactcgactttttgatacgcatccgccggctcggggggcggcgtttgtgattttgaatgtgtccttggaaccgtattcaatcccagt

SEQ ID NO: 16084 - DNA, 516 bp, Gossypium hirsutum
  Clone ID: LIB3829-036-Q1-N6-A10
gcattccaatcactttcagcatttcaaatcccactaatttcgtacatacagcgatccatcatagagctaaagaaaacaaactagactagtactatttaagtcctttccttcccttcttctggattcaaacacgggcccacttaaacaaaactgagaatcattgacaggcgctcaaacaaactgcgacaaacccttagattctacatgtgtccaaaactgggctccgacttctccaatgggtgtgggttcagaagcttctcaatgaggtgaaaatgagtcataagcattctcctacagcagtaccgaaccaatcccaaagcatcaagagcatctctgcatgtcaaacaatttacatttatagcaatgatacataaatttaattatgattcgcatcaacttgcaattcaatattatcaaatacattcttgggctcttatccttcagcctataacactaacaaaaattgataattttgcatttggaggggccagttaaagcatgcaacacatgttttta

SEQ ID NO: 16085 - DNA, 484 bp, Gossypium hirsutum
  Clone ID: LIB3829-036-Q1-N6-A11
caggggcatctattttcagaatagtaaattaacatgaaacaatcaagaaaccgggtccggggtccatgtgaagaccgaccagataaaaatgtgcagggcaaggggtcatcccttccatcggcggggcaaaaatgcaaactgggtatcggatgctcctagctaaactgggctcagggggtacttcatcaaataagttttcctaatcactatgggcccaaatgcttaataggggcatcgaatgaccaaaaatgctcaaactcaaaaattatttatttcaagaggaacaaagccccccccccaaagcacaggaatggagatggatggcaccagtaaacttcactgaccaacctcaagaggagtttcatgcctttgccagatcctcaaggctcatgacaacaggttgagctacatcatgggaagccttggagacagcggaatcaggggctgataccactatcgggatgcctttgtcacagcctttcct

SEQ ID NO: 16086 - DNA, 507 bp, Gossypium hirsutum
  Clone ID: LIB3829-036-Q1-N6-A7
ccaaccaaataacatttatacttattcaatttaatttccattctcacggaatagcattccattacagctctatttcatccgatcctagtatcctaaaaccagctcaggtcctaaatgtccataacagatgacaccaaagtccaacgctgacatcaaagaattataccattgggaagggtataggctcaaagttagtaattataccaggaaaaagggtaaaacattcaaaatcaatagataccggtgaagttacaatctcaaacccagctaacatactatgaaacagattgcaaaaacacagcttcaaacacattattaatttgtcagttgttcaaagaagaagtcaaagataaaaagtatccgggaaaatcgaaaacctatcgttgttgcgcagattgtgcatcctctttatcagactccttacctttttgcaaagtgggtgaagaatttgaagcagagttttcagctgttacagcaccactgtcatcatcctggttcttaaggaaa

SEQ ID NO: 16087 - DNA, 520 bp, Gossypium hirsutum
  Clone ID: LIB3829-036-Q1-N6-A8
agtacacataaaacggcatttattaattaggaccataagcgtaaaacttatagtatatgagactttatttcagttatggcacacagatcaaaaggatcaacaataagtttatgcttccgaaacaactagatgatggcctttctacatttcactcctttactcatcctccgcaactccatgtctaaatgctgggtctcacattgaggcgagatgctaacttctgacccagtgatttatcagcctgagaccagtatgagatccatatgctgcgaatttcatgagtcacacgtggatcagacaaggcctcaacccagcggcagatgaatcgctcttgcctgtctgctgcccaggacctgtatctctctccgggctgtttgaagttgttctccttctcaatgatgcacttctcacgccttccagtgcaaacagcaggtgggatagggaacatctctgcatgacgaacaggatcgtaccttgaagggaagtaatttatctcctcatccctgtgcatgaaattcat

SEQ ID NO: 16088 - DNA, 529 bp, Gossypium hirsutum
  Clone ID: LIB3829-036-Q1-N6-A9
tttttttttttttttttttttttttttttttttttttttttttttttttttttttttttatgaaaaaatttttattgtttaatttgttataataaaataaaaaaaaattagaaaaaaaaaaaaaaaaaaaaagaaaacagggaaaaagggaaaagaaaaaaagagataaaaaaaacaaaaacaaaaaaaaaaaaaaaaacctggaaaaaaaaaaaaaggaagaaaggggaaaaaaagaaaggggaaaaaaaaaaaaaagaagatccaaaaaatgaggaacacggggaagaaaaagaggagaaagaaaaagaagaaaaagaaaaagaacaaggacccaagggcaacaaaaaaaagggcaaaaaaaaaaaacaggaaaaagaaatccaagaaaagcaacttaaagggaaaaaaagggaaaagaaaaaaagggaaattaatgaaaaggggaaaaaaaaaaggaaggggaaaaaaggaaccgagtaaaaaggaaacagggggggggaaaaaaaggaaaaagaaaacacctaac

SEQ ID NO: 16089 - DNA, 524 bp, Gossypium hirsutum
  Clone ID: LIB3829-036-Q1-N6-B10
aacaaaaaaaaaaggacatgttctacttactgcaccttttttattattttcatgacatcgcttacaaacataccaagaaaacatacaataagtagcaaaaaagggttaagaaagcaacgacaagcatgatggatccctgaaggaccaaattatgtagctagggacaggtacaggtacaggtgcaaaacacaagaaacactgactagtaatcttctggagccaagggctggtgcgttgggtgtgctggctccgctgctgggatcaccatgtactcgtatatcagagccgctaaacctccacctatcagtggacctacccagtagatccagtgggggttccacctccatcctaccaaggctggaccaaatgccctggctggattcatggcggctccatcaaatggtccgcctactaagatgttggcgctcactattaagcctatagccagcggggctattgtccccacgcttcctcttttgggatcgatccctgttgcataaactgtgtacaccaatccgtatgtc

SEQ ID NO: 16090 - DNA, 452 bp, Gossypium hirsutum
  Clone ID: LIB3829-036-Q1-N6-B11
aaggggaaaaaaaaaaaaagggtttaaaatggacgcggggggcgacccggggaagccgggaccggggccgggaggggaaccaacaaccccgagggggggggggaaaaaagggggggggaaaaaagggaaaaggggggcccgggggaaaaagggaatccggccaaaaatccaaaaaaaaaaaaaaccggaaaaaaaaagggaaaaaacggggggggcaaaagagggggggaaaaaaaaaaaaagggggggggaaaaaggggaaaaaaaaaaagggaaaaaaagagaagccaaaagaaaaaaagaaaaggaaaaaaagcggggagaggggggaagagaaaagggccccaagggggggtttcttttaaaaaggggaaagggcaaaaagggaaagaccttaaccgggggggccaaaaaaaggaccaccaaggggggcaagggagggggggcccaaa

SEQ ID NO: 16091 - DNA, 488 bp, Gossypium hirsutum
  Clone ID: LIB3829-036-Q1-N6-B7
gaacctaaatctctcccttcaattgatttggctactttcactgccccaccatagaaaagcaaattcaatagtcaagcatggaaccaagtccatgaaccaataacaatgttataaccggacagacaatttggatcgagcttagctaggtcctagccccattaacaacgcaaacttgaactggtttttcataaatagaagacaaaacatctgataaaattgttggatttccaaagggtttgctcctactaaacacataatttagtaaagggaaaaaatgcctagcatatttaagaaacaccgaacagttcagcattgcaacaacttcggaaaaagaaaacgaaattctgaggcatattaatccacagttcactatcaaacaaatataaatggcccaaaaaaatagctatgattttaccaaagaaaccatcctccggtcacctagtccttgggctgctgaacaacttcgacggcctcatgttgttcaccat

SEQ ID NO: 16092 - DNA, 518 bp, Gossypium hirsutum
  Clone ID: LIB3829-036-Q1-N6-B8
aaatattaaaaaaaacttatatatattaagcatttcttcaacaaatgaatcaatggaatatacaacagtagaggtcacaaataatgaatgaattcactctaaagaagatcaaattaatagaaatcccaaaaatcaatgggaaaagaaaaaacataaatcccaaaaataaatgaattcactctatgtttaattcctataaacactaatgaaattaatgttgtgctaaagaagctgtcataaaacgtggtttcttggtcggcaatggactttcaacctcttgctctgtatagatttgacaaaatctgcttccatctttgatttccaactcgcacaaagcgggcaagtttaggtcaaagtcaaagtcgacgcaacgggtttggctcaacgcgccaccgtccgacaccgtcaccccactcaagctgacgctactgctcttgttgatggtgatggcggcggtggtggtggtggtggtggcaggtgtttccacctatctagagacagcgtttgtgacctcccaa

SEQ ID NO: 16093 - DNA, 469 bp, Gossypium hirsutum
  Clone ID: LIB3829-036-Q1-N6-C12
aaacaagaaagaaaaggggtttcactatatcccaggccgcaggggaaatggcatttgattacaaaacatccctttaaatttttttttaaaaaaaatgggaactgggtcatatcaactgggccaaggggaatctataaatggcggaccaaccccttatttgaacttacaattctgggaaagcataaaagggggtcccctgggcctgcctttaaaggggcaaaaaaaaaaatcctggttacagggaccggccaagccccaaatctagcttttggggggcacttgattctgaattttgacggccccaccccaaagaggggcggagaggtttcttgccccttgggggggaacccccaacaggggggttaaaaagttgggggcatgtttgggtgggcaaaatggggggggtctaaaaacccactgcttggggcggaatcacccaatctgagggttcccctttgggcggattccc

SEQ ID NO: 16094 - DNA, 498 bp, Gossypium hirsutum
  Clone ID: LIB3829-036-Q1-N6-C7
agacctaaactttctcccttcaattgattagggtactttaactgccccaccttgcaaaagcaaaggcaataggaacagctgtggcaacccagcctctgaaccaagagcaatggtataaccggacagacaatttggatcgcgcttaggttggcccttgcccctattaacaacgcaaacgtggacgggtttttatatcattagtaagacaaaccttcgggttaaatggggggggttccaaatggaatgctcctactaagcccatattgtacaaaagggaaaaaatgccccggatatttaagaaacacccgacagttaagaattgtaacaacgttcggaaaaagaaaacgaaattctgaggcgtattaacccacagttcactatcaagcaaagcttactggcccagaaaaaagtttttattttgaccaaggaaaccatccttcggccaccttaaccttgagctgttgaacaacttaaacgggcttatgttggccaccataa

SEQ ID NO: 16095 - DNA, 484 bp, Gossypium hirsutum
  Clone ID: LIB3829-036-Q1-N6-C8
actgcaccttttttattattttcatgacatcgcttacaaacatacaagaaaacatacaataagtagcaaaaaagagttaagaaagcaacgacaagcatgatggatccctgaaggaccaaattatgtagctaggtacaggtacaggtacaggtccaaaacacaagaaacactgactagtaatcttctggagccaagggctggtgcgttgggtgtgctggctccgctgctgggatcaccatgtactcgtatatcaaagccgctaaacctccacctatcaggggacctacccagtagatccagggggggttccacctccatcctaccaaggctggaccaaatgccctggctggattcatggcggctccatcaaatgggccgcctactaagatgttggcgctcactattaagcctatagccagcggtgctattgtccccacgcttccttttttgggatcgatccctgttgcataaactgtgtacacca

SEQ ID NO: 16096 - DNA, 527 bp, Gossypium hirsutum
  Clone ID: LIB3829-036-Q1-N6-C9
ccaagcagcagaggaagcattttagagaaataaaagaaatacataaggtgtatgtgctgaaatacagtttttattcattcacatacacttatccttttattaaagactttcaacaaacatgcatccttccatccacccctcacatacaaccctacaaccatatcaatttctggacataaagatgagtggatgcagtatgttactgacatagagaagcaagtacctccaacaaggaagctgcaaatttcatttgggtctcctcatctatggtcaagaagagagggaaatggacaaagagagatttgatcgcattctgttcggcaaagcgaagggagtggtagtaaacataattgcacacaaaccgtcctgcatcatcggaggtcatcacctcaaatcccttctttgctaaggcctttgtaatctcctcaacaggaagagaagtctctcttacacgtgaaattccaccatctgcaggaataatgggtactttctgaggtttccatcccatctcatcagggcaacggaaa

SEQ ID NO: 16097 - DNA, 491 bp, Gossypium hirsutum
  Clone ID: LIB3829-036-Q1-N6-D11
caccaacctctacactacattatctctataacattccaatggaatattaaaaataaactggggaatcccacattgtttcttaaacaaaatttgagtcctaccaaatacaggctccttgctttagaaattaaaaataaaaagaatgacgggctgagtggccatattacatatggtatgaagatttaacgcatagctccctgtttccaagaatcctttgctccactttaccagagcaaaagaacagtgggaaaagaagagaggtgacaaaatattattggtccatgttgtcagagttgaacaaaacaatgacaatggcggttcaccatctctcccttgaccttggcctgtccatatctctgtttcctacaaatcctctatccctgccagcttgaaatcctcttcggtcatcacctggccttgtccatgcatcagcagtaccacgagatctgggcctatccatgaactccacacttctagagccatcaatggat

SEQ ID NO: 16098 - DNA, 426 bp, Gossypium hirsutum
  Clone ID: LIB3829-036-Q1-N6-D7
aaaaaaagaaaggggtaaaaataaaaagttaaagggaaaaaaaggggggggcataaaaatttttcccaaaaacccccccttaaaaaaaaaaatttttaaaacgggaaaaaaaaccacccccaaatccttttaggggggggggggttttggaaattttttcaacttgaaatttggacccttatgggggaaacgggggttccccatataagggaaaaaaagggggtttaaaaagggggggaaatttagggcctttttttaaaaacccaacgtgggcccctgggaaagggtttggaaaggggggggggatcccaaaagcacccctcgaagggggggggggaccccaaatcttaaaaagggggggaccatggggcccaattaaccggggggggggtgggggaacccaaaaaggtccccaacaaaaggggg

SEQ ID NO: 16099 - DNA, 516 bp, Gossypium hirsutum
  Clone ID: LIB3829-036-Q1-N6-E10
ggaccaaccaaataaataagatgagcaaagtgttaatataaatcataaaaacaaaatttctagtgtacaatagcaatttcaatatataaactgttcttcaatgttatagcaaacaacaatgccttacaaacaaggattatattccattgaatgaagggacgaaattgtaagaagtgtaaatttataatcttacacataaaaaaaacataagggtattctttctttttagctcaaaaattcattggcgtctgattttcccctattctaagcacctacgactcaattcacattggtccgggtaatcaataccgattacctcggccaagtttccggttgccgaagcatcatccttttgatgaagtagaactcgtacacccaattctcgtaactgatccaccagaccgtaaagaaattctaacgttagcctggactgcgcgtttagttcctctctaacctgcggttgaaccctaaaccagtctcctagcattttgtgaacgtgagaccggatcatcctcc

SEQ ID NO: 16100 - DNA, 520 bp, Gossypium hirsutum
  unsure (1)..(520): unsure at all n locations; Clone ID: LIB3829-036-Q1-N6-E11
aaaaaaaaaaaggaaattgacattttatgttgatatgcaaaacaaaacttccaatgtctcaaaatcacaactctaagattccaacgacaaaacatagcagnaaaatttgtccacatacaaaactcttaacacatgggtaactaccaattcaaaagatcctgtttgatgggcccatggtactcttcaagtagaggcacctcacgttttgccagtttttcttcaacaatgaaaccaggaaattgacgctcatttgcacattttggaagatctgcttctcctccatcgcaacattcccaacggcaactcccatgcaaagaaccttcttcagctggaacttaaccatcgccttggtctcattcactttggactctagcgattcctggtgagtaacaagggttgggaatttcccggctttgttgagaccaggacccaggagacgagggatctgcttgataacagattcagaagccaaaaaagcatgatacttcttggcaagctttttgaccaacttcttgttctt

SEQ ID NO: 16101 - DNA, 533 bp, Gossypium hirsutum
  Clone ID: LIB3829-036-Q1-N6-E12
ctaaatctacaacttcacttttctagagaaacttacttggatgcaaggggaaataaagcacacttaaatacctaaatttcttgagttctcctctcaaccccctaaccaaatcatccatttcataaatattaatccaccaaaagaattatccattcagttcaaagacaccatggagcatctacactctacctcaagaaaaacactcaagtggaaggagcccacgaacccacaggagaagcacccccatcgggaagaagatattaagaaatggggcacgcacgtcatgggatccccagcagctcctagtgcccatccagacaaccagaaggcggctttatggaatgctagtgatcaccaacaaatctatgagctgccctatgtcgtttattcccctgcagaaagaccaagccataatccttttgaacctgtgattaacatgtgcaatacctggagtaggaagaccgagtctatagcacgcaacatctgggacaaccttaaaactgggaccgtctgtatccggaagcagcatgggg

SEQ ID NO: 16102 - DNA, 509 bp, Gossypium hirsutum
  Clone ID: LIB3829-036-Q1-N6-E7
aattaggtgatcactccaattgagttagaaaaatccttggaaaataaaatcaaacaactcaagagtgccgaatttgatttgataacaaaataaatttttcaaagtacttgtgcccggtttcagaagtgtcgaactaagcttaactaaactagcctctcatagctagcaaagcagaacacgaatccattgggaagaatatgaattacaaactggctcttggaagatgaagttcttcaagtcgaccgattttcccttctcccaactagccgaatttactagctgctactccagctccttgatcgggttgctggtccaatttttttaaaaaaattctgcttgccgctacgttgctgtatttttttctttgtttttctccactcccttccagttgctaatcttctctatttatggaataatatccttccacaattcaaaaattaaattcaatctttatcccccgtttcctagctaaactcgttgcatgaaaatagcttcagcttagtagagtt

SEQ ID NO: 16103 - DNA, 317 bp, Gossypium hirsutum
  Clone ID: LIB3829-036-Q1-N6-E9
aaaaagagaaaaaaaaactttttttgggggcaggggggccaaaaagaaaagaggcaaaccccccccattttaaaaggctaagggccaaaaagaaaactttaaaaaaatacattaaaacccaacattgaaaaaaaacaacccttttggaaccatttcccgaaaaaaccaaaaatttgatttttgggttattaaaaaaggggccttttttttttcacccaaaccccaaaattttaagctttaaggggggccccaaaaaaggttaaaaaaaaaatcctttgggggagaaaagaccatttaattttcggccccggggggcc

SEQ ID NO: 16104 - DNA, 517 bp, Gossypium hirsutum
  Clone ID: LIB3829-036-Q1-N6-F10
gatagcttggcagctcatgaagttgtttaattccatgacgggaactatgaaaaacaagagagggggaaacattctcccgcaggctacatagtttataacaaaccgataaaagatttgatcgggctctattgaccgactctccaacatacacgatttataacaatcaaaaacagattgaactggtctcggttgactcggactctgctacatacaagagcataggcattataaaagcatatgcccaagcaacgatacttcctcaataacgaaagaggactactggaaatggcaagttcaggatagatcagatctaacggagatacctttcaagcttctgcagcttaaggggaatgttcaggtgtcttcagaacagtagctgtgttacctttgtgtgccattacagcaacacggaactcttcgactatggaagcgtccttgaacttcaaagccaatgtagacagaccctctttgtcttcaccagtactattcatgcagacaaaagtgatacctctcttgt

SEQ ID NO: 16105 - DNA, 496 bp, Gossypium hirsutum
  Clone ID: LIB3829-036-Q1-N6-F11
caacactcgcatgatagatttaagtatagaatattccagtaacacttgtacaagctaattaaaaaacattaagacataagaatcgggtaaattctgcttatttacaccaatatctaatattcagcaggagggggattacagtcccagggggcaacaccatggggttattaggcgactaaaaattgcagcaaccccagttgtttgttcaattttattgcagagattaatgtgggatcttcggcctcttcacgatcatcacagagcaatgagcatggggagaacaataatcactcacactgccaagaacagccctctttatagctccataaccatggctaccaacagcgagaatggaggcatggtgtttttctacagcgtcacagagaacattccttgcatcaccttcccccacttcaactacggcatcatgtaccgatttgctaaggcagagttccttggctttttcaacaaccctgggcagcgatcttcctcaaat

SEQ ID NO: 16106 - DNA, 555 bp, Gossypium hirsutum
  Clone ID: LIB3829-036-Q1-N6-F12
gttgggtgtttttttttttctctaattattcccaacttttattgatttatagaactgccctggctaaccctataacattacaacaggaccaaacttctttttatatgggacaacagtacgatcttgaaaaagaaaaagtggaagcaaacaaacaacaaacacagactcaaggcagtagcagagcacaaaaactcgctcctttcatttaataggagcgataataaggagcatcctgggtacctccgcgggggttccttctagtcccagcattgttagacgccgcatttgggaagtcttggttccccgttgtaccggaagcaccctctgtatctccgccaaaccccatactgctgaggtcatcttgcctgcctgtatcatacccactacctgcggtggggtacccacggttggcatgtccaccggtaccgccatagccaccagtgtcgcctatgttgtacccagctgtggggtagccagtgccaccaataccaccaccaccagcatggccagctgtggcgttatgatggcgggcctcttgtttcctcagctctgcat

SEQ ID NO: 16107 - DNA, 525 bp, Gossypium hirsutum
  Clone ID: LIB3829-036-Q1-N6-F7
gatctgaaatctgggtgagttttgccgtcttagagtgaaattaaatgtacagagaccccttcgcaggggtatttttgtttcaatagggaatggaaataaattttagattccattcaagtatgaaaagctgccgactttttgctttgggtgtggaatgttggggcacagtcttcatgattgtacagaaattgcacctttacggaagaagatgctgcaagaatcctcagaatccctctagcacaaacaccgcacgaagattttctgttctggggaggtgagatgtcgggtgaatttacggtcagaagcgcctacaaactattacagagatcgattgacaatcctagagcttatgctttacaaaccatctacagaaatttttacaaaaaactttggagcctaagtctaccaacaaaaataaaggtcacaatatggaggttatcgtggaactattttcctacaaaggtgaaccttcagcattgaaagttaacagttaaccaaagttgtccccgttgcggtgaatgagct

SEQ ID NO: 16108 - DNA, 517 bp, Gossypium hirsutum
  Clone ID: LIB3829-036-Q1-N6-F8
ggaaaagacctattaagattagcctctaaattctaatatctttacactattagaaacgcaaaactacaaacttaaaaagtaacgtttaaaatccaggcatgtattccattctcaagataatggcaaaggaatcttgcgttcccagaattaaccctaagtgatgatgatacatatgatcggatagtgtagaccaagaggatgatgtgttccattagtacaaaatttacaactccacctgcctgatctctacatgttcctggggtatttgagcttagattgatgttcagcatcatccatgttgatacaacgcttcatgaaagaatccagagttttctgcttccctggacttccttggtgaatcaggtcgacagttttctgctttgtgggacttctgtgttcttggctgcttgaaacttccaaggaattctcatggccatctagcatctgacccagattttccaacttgttctgaacaacatcccatatgatgtcatcaaccgtgtcatttgccagcaga

SEQ ID NO: 16109 - DNA, 533 bp, Gossypium hirsutum
  Clone ID: LIB3829-036-Q1-N6-F9
acattaatactaaatgattttgcattacatgaacatacaaaaaaagctataagattttacaatctgatcatctaaataaaaataatattaatatattttcagatattttcctctcctttttcctagtgagaagaaaataaaaaccagaaagagcttcaaaatgaatccagaaatataatggaaaaaaattaaatatttcagttcaccaaatccgaaacccaatccaaattcggatctccagaaccctgacccggattaccccttcccaaacaattctctttactcaatttctcaaataattgtgcacgtaaatcccttccggattcaactctttccatggctggttcatcttcttcacaccatttttcaaataaatccaagtatccaccgatcccatgacgggtcaagttctgggtcggagtgttgagaaggctacaaaatccgtgtaggatcattgaatctctgggtgacccgaacatggaaggagaaggtgatgaacaaagaccaataggcatggacttaactttcccaag

SEQ ID NO: 16110 - DNA, 485 bp, Gossypium hirsutum
  Clone ID: LIB3829-036-Q1-N6-G10
gaacttggacgaaaataatcattttatcgaaccagtaatgtaacgtttgagctcttccaagttacaacttataacagggattatatcatgtgaaacatcaaaatcttacattttcttggatctttgcttgtttagttgtttctgcaaatgcgttgggtgggaaatgaaccagatattatatcagcaaaaggcaacataccttccatctaaagaaacgccattaaagcccaaagatacttgatttctaatggagtacccatgggtgatgagcatttttctctgctttttgggtcactcccttgggtttccctgcatgttttcttaaaaaaatttgttgtttgaagtggctgcacttgtgaatacttcaactgcttcagttataccttctctgcatgttccaagtattcattgttattgctaaatgaaaaaaccttttgattttccttcaactctggaactcggggagggccccattcacacctcct

SEQ ID NO: 16111 - DNA, 364 bp, Gossypium hirsutum
  Clone ID: LIB3829-036-Q1-N6-G8
gaaaaaaaaggaaattatttttttcaaaaagaacttttcctcctaaatatataaaactaatctttgaactttgctccctctaagggaaaacccatctagggatataccccatgaaatcccggagatgacccataaaaacccctttggctgcaataacaataaatttgatcccaccgaaaaatatgctttaaaccccgggattttcccatcaacgatgatcggctagttctctcaagaaggggcccaacttcatcaaatgattgaaggcgggaccccgagtttgatcttttccttgcaacggaccaagaaaaggagtcgtgggcctgaaaaacaacccctgaaaaaaccttctttgaaccgatat

SEQ ID NO: 16112 - DNA, 508 bp, Gossypium hirsutum
  Clone ID: LIB3829-036-Q1-N6-G9
accacatgctacctatgtttatttatttaactgtccgataatacgtaaggtgacaagactacattttttttagctaaaaacgaccctgctgttatcaacaggcatttgcacatgcatccaaaacagcattgaaaggcaccctcacataactagaacaaaggggcgttggcctgattctgggataaagcgcgggggtatggaactactgagatccaaccctgagcttcaacgacgcacccaggagactgctcgtttctattttaaaccgccaattgagcggtccgtgaaacccaatagcagggatcatgcagcccaaaattagaaagaatgccttgtatcattcaaaaagcaggcttcataagtgaaagaacatttcgaagcccacaatcatcacagacacccaaagctttacaaaaatggcagcggaacaggccacatataaaccccttccagaacctgggacttatttaccttccaaaaagacatcacccacgtgctcacacgcaga

SEQ ID NO: 16113 - DNA, 526 bp, Gossypium hirsutum
  Clone ID: LIB3829-036-Q1-N6-H12
aaaataacaaaacttatatataaatggagcagattctaatagcatgttcatataaatttgttgcaaataataaatttagtatcaaatgaaatacagggttaccttcaataaaaacttaaaaaggaaagctaggtttttcatgggttctacagattacactgaacaacaaacaaaaggggggctataatgttacagtgttgctaatacatgcaagttacctccagtacctatttgaaaggtttcgatttaagacttcgggtatattggatcagatgctttgttcgatgtttcttgctcaactttcacaggtggttcatcgatagccataggcctgacatctacagactttgtacttagggtctcatttgttgccatgttgtcgaatcctctagcttgctctgcagtgcctttcggagcctccgaatcttttctctcgggttcaattgcttctctctttactctgctagggattggccgcttctcatcaacctccatgtctgaatccgggtcacatctttcatctgca

SEQ ID NO: 16114 - DNA, 517 bp, Gossypium hirsutum
  Clone ID: LIB3829-036-Q1-N6-H7
gaaaataatctgttcttttacttgcttttaaaacaccatcactgtaaaaaggaaaaaataacaaaactggataaaaaagagcaaaagaaccaaaaagaaaaaagaagaggcaaatacatatagttcggtaaaggcagacatatagaactggaattacaaccaatgagagagttaaataaatatctgatccagatggcaggaaaatgtttcaacttcaatgacaagtgctgcttgagagcattaggatgcaacatttctggaacacatttgcttaccttggcaagaagatggcagttggatttccaggggatggaggattctggtttagcagggatgcatgtgtaccagctttagcactagcatcagagtcagtgaatgacagtacttctacctcttcaagaccaagttgtcttttgatcaagtccaagttctctttgaggacgtcaatctctccaaaggaagtttcaaatccagagcttggacaccaattttaatagcctcatccttcttgaacctc

SEQ ID NO: 16115 - DNA, 475 bp, Gossypium hirsutum
  Clone ID: LIB3829-036-Q1-N6-H8
aagaggcaaacataaatcagctttaaataataccgcatttggcatcagcttaattagggcaaatcttacacaatacaaaaatcattttttgagcaccaattttcatggtcccaaaaaaccaagtaaaatcaagggggaaaatttctctactacttggatttgagttcaacaggtgggtacagataccttgaccaccaggaggcagccatctcccatcttcatctttcatcatacccaaaccatacaacattttacaattttcaaggtttaggcttttttggggggcctgaattccctgcctaaaccttgcgcttgattcccaaaaaatgctcaacctttttatcaccaagcataggcgtaaagcctcccggaaaatccttctcaacagtagcaaagccacttgcaggaacactaatttgccctggtttgacgggaccactaaggacaagggagggggttttcagctgagcttgag

SEQ ID NO: 16116 - DNA, 517 bp, Gossypium hirsutum
  Clone ID: LIB3829-036-Q1-N6-H9
tttttttttttttttttttttttttttttttttttttttttttttttttttttttttttttttttttttttttttttttttttaaaaacccaaaaaagggcccttttatagggcaaatttaggggtttctcacaggctcatttaatcccctttttaaaaacattcacaggtaaacttttagcatatatgtttcttctaaaggaaaatggggattttttttttaaaaacccggaaaaagaaaccctcaagggggggggcccttttgggtcttcctctcctgggccctttttttaaggggtccccatggcctttggtaaagggcttttttttcactctggtaaaacaagggaaaaatatggtgggtttatttggctggggggggggatttaggcagttgcaacaatgcctggtcggaaaggggaactttcaacttttgggggaaagggaaatttttttggggctttttttttaaaagctttaaggggggaaaaaagggtatgggtcttttccttagctt

SEQ ID NO: 16117 - DNA, 539 bp, Gossypium hirsutum
  unsure (1)..(539): unsure at all n locations; Clone ID: LIB3829-015-Q1-N6-A1
aaacacaaattggattttcattccttgtgtagaggcccaatttcgccctggcctaagacccacaaaaaataataaacaggaataaaagcccaaattttcatacagtccattacaatatgngaaagcccaatttaaaacccaaaactaataaaaccctaagacccaattacattggcccaaatagcccaaagctcaaaccatgtttgcagcaaaccctagcccttgtgccgcagccaactactccatgtatggcctccttgcgccgcaaccacgaccacctcgccacgttagcacgcccgtacgcctctacgtcgccttgtacctgcaaatcaggctaaaataacagcacaaaatggcaaaaagaatgtatttttctttctttttatttcggctatataaagccatacaaggttgtattttttggttacagagagaatacacgaaaatatacaatcatcagaatcaaaagaacaaaagtttcaaagatctatttaattttatttttactatttttatttcttattttggaatgaatgtgt

SEQ ID NO: 16118 - DNA, 551 bp, Gossypium hirsutum
  unsure (1)..(551): unsure at all n locations; Clone ID: LIB3829-015-Q1-N6-A10
aacatactgaagtcatataaatatatatatnntctttttatcatctccagggagtattataaagacatctagtttttacatatttccatataggggcctcaaaaagaagcagggtatatanttctttacactttgaatcaatataagagacttctttgtgatgcctgcttcttccgtagccacaccatctctaggtgttattccctttgggaaaaacaccctgcatttttttcttttttctcataaacactcgaagtaagatgagtggcctgccagctttctggcttggaccatcagttcatcatccatctcatttacatgtacattgcttgcctgaaggaaaaaaaaacttcgaaactttttgtacgtgcttctacaacccttgccatatcaaaatttggaaatgaacatctatcatggacgacttgngaactttgggtggtatggcacataatgaatcaatccgatcataaaaggagacaaaagatcaagactccntaaagatcccaataaccagaattccttggggagaacactaactgctttagctg

SEQ ID NO: 16119 - DNA, 539 bp, Gossypium hirsutum
  unsure (1)..(539): unsure at all n locations; Clone ID: LIB3829-015-Q1-N6-A12
gatcctctgaaatgtcgaggaaaactgtgataaaataacgcaagatgctgagatgaacgcaacaataaaaaataaagagacaaaacaccaatttaatgtgctggttgcagacaaaaccgcatacaagttctgggctatgtagttatctaagctagctgctgctataaaataagaggggcaaaacattgaacgcaaacatttcttactgctgggcacattgcactcttggtgctgactcatcgtcatcgtcatcttcatcataagcttcacggtgcctatgctgtcgttccttccgcctctttacctcctcagcactgacatcatgcaaagtagtctcttcacagtcatcaagctccatgtctgtcaaatgcttactaggcctcatgggcaatatatctctcgatcttccggcattgcttcatggtgaaaataccccagattctgggaaaataacatggaactggatgactagcttgcccttcataaaaggtctctgnatggtgaggcatanccttcatcattgatagccttgtattgac

SEQ ID NO: 16120 - DNA, 536 bp, Gossypium hirsutum
  Clone ID: LIB3829-015-Q1-N6-A2
gatagaaaggcaaactcgtggatggtcaaaattgtaaatacatcagcagctgtgtactaaaagcaaatttcaccaatttcatgactacggtttcgaagagtaataattttctcacggattgacaatttatatgtagcaatcaaacccagttaggccacagctctggactctatggttaaaaaaacagggaaacattggctatagttagtaaacgatgttgactgttgttgaatcttacatagcaacaagctcaaccttgtcttccttttgcttaagcgctcaagtcccgaattaaccgagttccaccgtgaatttggcgttctcccttttgccaccttgtttgaaaccgaatgaatgtctatccccatgaaaggatagcatgttgaattaaaatcctcggttaccctgataaaaacatctcatcttttgggcttcagacatgtcatatgcaagaaacactcgaagtttttaacagtcaacgtgggttgcaggtcttgatggccttcacccgttgtgcacttgtagtccatattgcg

SEQ ID NO: 16121 - DNA, 519 bp, Gossypium hirsutum
  Clone ID: LIB3829-015-Q1-N6-A3
acgcaaacgcaggggggttcattgctattcgactcaaaagctgttcttatatgctgctctacccagaaattaagttaaaaattcgaaaaattttaagcattaatgacatagacatgaaatggatgggactattcctaataagtagagatgatagcgggttggaaatctgcaattatctggatttgaagctattccgaaaactttgcttaaactttatacctctcttttatcttcagtaccagcttccaggtttcttccatctctagccataacaattgtgccttgaggaacccctgtttgtattgggattcgttcaccggaaccagttgcttgacttgcattaccagaaacagccatctttccccgaagttcacgtgagaacgcaatgcttcctactgcttcaggttccccgcctggtgcataattttcacctgttctcacagcagatttaggagagtaggttgtcgaccaagatcctccgtttgatccagccaatgccattattacatctgccttgtt

SEQ ID NO: 16122 - DNA, 554 bp, Gossypium hirsutum
  Clone ID: LIB3829-015-Q1-N6-A4
cttggtaggaattgattttcacaaatatccatattttgtacaaaatgtagtcattaaatcaaatcaaattaaaagaatagaaatttagaatcgagtatttaatataacaaacaaagataagaatataaaaatcatgtagaaccatcttttactatcaaatgaaataaaaatcagactagttttttttttcccccaactacatgcaacaaataacacaaaaggacaaatatcatcacatggaccaactaaaactaaattttcatttaagaagagcagcaaccagagttctggttaacgggctgtcctttgatattcaccgttggaggtctcgcattgttcatgcctggttggctagccatcctattcttgattgaagcagccatggccatgaaagcctcttcaacattagtggcatcctttgcacttgtttccaagaaaggaatcccaatgtcatcagcaaaagctttagctgtctcatatgacacaactttgttttctgttagatcacacttgttcccaaccaaaagtttgttcacattgtcactggcatagcg

SEQ ID NO: 16123 - DNA, 534 bp, Gossypium hirsutum
  Clone ID: LIB3829-015-Q1-N6-A5
atattcaagcaaagcaagaaaattgaaaaaattagtttcatacaaagcatgggaaaatcactctttgaacaatcacaataggtcatagcaacaatagggtaacagcagagatgtactgcattacaaaccaacattacaacttcatctttcaaaatggcagagtggctttgcgaccaagaagcctgatccagcaaaagaatttgctgccaaaacagtcaaatactggttatattcgatcagctaggtaccttactagagagttgacaggcttagcaaagtcaagattttcagtcccctggtgcctaacttttattcgagctaggtaatcagcagcaatccaagcaaagcttaacatcacaacgccttcatcgccatcaggcttctggaactctaacttcttctgaacccattcaggatggtaagtgacttggtaccatgctgaagcctttctttcatacaacttgttcttctcatcctcattgagctgctcaaattcggagtccatgttctcaaaaagttgtctgaattctttcc

SEQ ID NO: 16124 - DNA, 440 bp, Gossypium hirsutum
  Clone ID: LIB3829-015-Q1-N6-A6
gtagaagagcagataaaatatcatactaagcatcagaacaagcacaagggcatatgtatagcctaatagtgaaccgttcactcgaaaacacaagcaacgagtcaacaacagttctaccgtttcactgcaatgcatatttcctaatattctgggactttacatgtcaaaatccaaatggaaagaattcgcaaatgtgatgcaagaccttttaccagtaatcaccgcaagaacataagccatccttgaaatgatggaagcgcttgttgtctctaataatcaattccctcccgacaatcctcgatatgatcttgatggcattgtgacagtcaccgcatacacggagattcttgatgatcctaagggtttgccttgcaggggtactgattagaccaaatgctatcgccaatcgttcactgtggtacagcagtgcttgctctttc

SEQ ID NO: 16125 - DNA, 537 bp, Gossypium hirsutum
  Clone ID: LIB3829-015-Q1-N6-A7
ggtaaaatataagatttttatagatatggtcatggattcgaatgaaatgggattaaaattacaccgaggaatgaatccaccacatcagcatcatcacggctgactcaaagatggttaaagtaaaacacagatttggaaagtaaaatcatgagaccctacaaaattacatgttaagtttaccataagatgctctgtctcgtactagaaaacacagaccaaaggtctaaagtttatgtcctaacattgttccttgcatcagaaacaatttcctttaaaaaaatatatatcccctaaattcatcttcttaactatgctaaatcaggatagtagacagaccattaggccgtcaatcgcagccgaaaactccacaagcttcagctgaccctgcacttccaatgtcttgcttgccttctccagaagagccatgcctgaaaccagggaaaactccagctccaagtgctccgttgccacctgtagtgctagcttcactttgcagcatgtgaagacctgtgcttccaccggagctcatgccaagtg

SEQ ID NO: 16126 - DNA, 510 bp, Gossypium hirsutum
  Clone ID: LIB3829-015-Q1-N6-A8
attagcaacacaatgcagacaatcttaaaataaaatgcagaaacaaattccaatccaagtttttacaattcatggcatatatgtcaaagtcccttattgagaagggaatatgataccataggcatcaatcttctttcctttgcaaattacaaggactttttatgaattccaactcacaaaatcgacatgtttcgaaagaatcaatgaaaaactcaacagaacaaatttggggactcgcagttctatgtatctacaatcatgccaacatgtttttcccttttgctttaccttattacatgctgagggcaacaatgtcgcatcccagcatgttttcattttccaccgaaagggctgcctgattttatgcaattttcaaacaaccttttttcatgaactacgacccccttttttttttttcttttctttcccgggatttaggcacagtccaaaccggagacttttaaaacaatatctccttttgaaacaaaggggttgactcgagcccataaa

SEQ ID NO: 16127 - DNA, 543 bp, Gossypium hirsutum
  unsure (1)..(543): unsure at all n locations; Clone ID: LIB3829-015-Q1-N6-A9
tttntttttaattcgattgacattcattcatggctatgttaaaacaaaacccaaagcgatggaacatccatccatctctgcttactaaaaactatattatataaggcctagcgggtgccaataaaccacctcagctatatacagccacaatgggactgagcctctcctactctaagtctccctcttataccttcccctgtctcaaacactggctattacatacacatcttccagttagggaccctttgccttaaactctagaactgaccaccttcgaatgtttgtccgaactgccagtttgctggagccacattgtagcttgtcacagtccggccgtcacttgtggtgacttggaacgacaaactttggccgttgaggtaggagttgctctgccagttttggccccaatttctggacattgattgccatcctgttttagagcctttgattgagactgcatggacatctccagcaccaccaacatttgagatgaggaccaagttgaagtaagagtgaccattgatagtaaacctgattcctcct

SEQ ID NO: 16128 - DNA, 391 bp, Gossypium hirsutum
  Clone ID: LIB3829-015-Q1-N6-B1
gttgacactggatttatctttatatttatatcatagtattagtacaacaatatctcctcacagtgccataaaaatgaaaccaagaaccacaacaaccgagtttatacaaagaggatataccccaggagaatgagaaccctacaatccactttacctgagttctcttcacaactggaagccttctactatgctgctactgacgcaataaagaagctgcaattaccaaggacttgctaagcatctttggaagcttcctcctccacttcagcctccttaatggtaatcacaggctcaccactcccgccatctttatcatcagggtacctaacaacaacaacagggcaaacacagtgatggacacaataatcactaacactgccccacgcgtccg

SEQ ID NO: 16129 - DNA, 539 bp, Gossypium hirsutum
  Clone ID: LIB3829-015-Q1-N6-B10
aataatgaaagtcaggaatagacatcataaaataataattctaaatcagaggtttaaatatcatctttgatctttgtatttcacatgtgccctcagactgacgctagttccaatgaaattcaatggatgttaaacagtatttatatatacaaagcaaaacacagcagattagagttgtatagccttacgcacctataagtctcctatactataagttcatcttccagatagttatactcaaagatgaactcagtcttgattctctgacaccatccatgttggtggtcatcatttgccacgtgaaaatcaaagtatacataggttccctgttcaaattcatcagtagcaatttttggttcctcatgccgctgaaaccatgtgttgtattttctatggtatctccaagattgcttcttcagctcctttgcagctagatattgatgataagtgttctgttgataataaaatgcaacaaacagtgtatcagtgccagtgccatatccatccatgcttatgcgttcccagaaggcaggattatt

SEQ ID NO: 16130 - DNA, 553 bp, Gossypium hirsutum
  Clone ID: LIB3829-015-Q1-N6-B11
gatgctaattgtatctttaactgagcaatagctacaaacactacaaatcttgctgataatgtcagaatcagcttcttaaaatatggttatattatacatcaatggataaatctgtgccccaaagtctccctttttgacaccttaacctcgtagtataaactaggtgattataagggggcaaagctcaaaaaaagtggatgctaaagttagaacaagatccatccttctgccaattccatggcagtggttttaacacctctgaatttggaagaacttcattaaattgatcttcttaatggaaaggcatccaccaatgagcctatgtaaagtccaatcaatttgtttttgacttttttatctgttaaaggaggcagctgaagtatcatcataatgtcctctccatgcatttccacttgtcgatctcactacaagcttgattgggaactggcacatttccaaggtcaccatccaagctcatttgttgtacttcaagggatgacagtattttaatgctctgaacacaacttacaaattcttcccaaggatcatcacc

SEQ ID NO: 16131 - DNA, 412 bp, Gossypium hirsutum
  Clone ID: LIB3829-015-Q1-N6-B12
gggaaaccttatccttatgatacgaccttacactcttttttaactttccaatattatacaagacatacaattggacctttagcaattgggcaaacttctggatattattcatgtaattaacatattagattataaagatatatactttgagaattatggacttcctgatttggccttgattacctgcaggtttgttgtttatttgatggatgaactttattagggatgggcaccggaaataccagcctgtgggggccggcacactcctaggtcggttcatggacagactcttttctctcttctctttagtacttactgggcaggctttagcagctttgcaataaactcatctatgttcctatctgagctcccacctacactaacagctcttttagcaagccgaacgcgtggg

SEQ ID NO: 16132 - DNA, 529 bp, Gossypium hirsutum
  Clone ID: LIB3829-015-Q1-N6-B2
agggaaaattctgaattctgaattcctatattgtacatcaaattgtgaatacttaacataattaaaggggcccgtttcccataataccagttctcatcatcaagaaaatagaaatcagatatgctcatgtttcattgtcttcaaggatcgcctgctgcaacagccaacaattctggagctgtgagaaagcagtttccctgaaactcttaaccctaaccaagcaaaagtgggtgcaccttatcccaaaccctgaacccactttactcgtcttcaacaaataacacgctggagcagccgccccaatgccctgcactactatcccccatgcccttgtattacaaacctcctccttcccttcctcttcttcttctccttggtgtatttgttcgacaaaaatcagcccatcaggcattggactctcccctttctcccacttttgtttcaccaaaccccacttatcttcctccgccttttccgtccttgttctcgtggtgttattttttacgtcggagaacacctcgaccaataa

SEQ ID NO: 16133 - DNA, 499 bp, Gossypium hirsutum
  Clone ID: LIB3829-015-Q1-N6-B3
agccaaaaaaaaagccagggtcttcactcaaaattatggaaaggggttaaaattttacagactatgaccatatatatttatatataaccatgaatcattcttgcaaaacaaacgaaccctttatccttttctccattggctgggaaggggcaaaatttaggggggaaaacataccattgaaactagaggcaggggcaggcttgaattcataaggaccttccttcactccccaaacgacctgatttccatcggcatcataacccctatcccagggatggatctcattggtcttcaaaattggaagttctgaagggcaaaatgctgctccattccatgaatttgggaatccacctgggggagttgaaccttcgtataaacagggtttccccctctcacagggtttgaaatatatagttggcaaatgttcagcaatatcatcaataacttcttcagggagggggcgtttgatcccttggacgatcgcaaaaattcttggatt

SEQ ID NO: 16134 - DNA, 533 bp, Gossypium hirsutum
  Clone ID: LIB3829-015-Q1-N6-B4
aaaatccaaaagttagaactcttaagtaaaaaaaaaaatttagactcaaaactaaaataaataatacatatgcaaggtaataaaacatacaatgcattttcttaatcaaataaataatacatttacttaatcaaggaaatcttgtacatcattgaagtcacaccatcaaatctatacccatcaaacttatactcctccagcatttgaaagtagatacctcagtacttcccaacttccataattaaaaaggcgagaatcccacaccgagtggtgaccccttgaccccgtgtggaagtaatgaccatcagtttcatcaaacatgttcagcccatctaacacattattggaagcatggcttgattagctttggattattttcaacgacacgcttaagaccttcatcagtaatcctttggcaatcaaccaggctcaagcattgcaagctaccttggtctcaaccagttattttgtaaaagaacatcatccgtaatcttctcattcggtggcggatttatgagaatatccctccataa

SEQ ID NO: 16135 - DNA, 535 bp, Gossypium hirsutum
  Clone ID: LIB3829-015-Q1-N6-B5
gaacaaaaaattagcattatttatttattagttacacaagctatcaagttcacaaacgtgcatcaaagtttaatattatcctaccaagtagatcaaaaaagataaaaaaaaaagagctaacaagtaaagaaaaacaaatatttgaatcatcgaagtgtaagaatctgggttttacctcaatgtcccaattgtatttgctaacttcaatcattttatattgttctcgatgattggtttcacaattcaaactcatcttcaagcttcaactgctctgcagcagcctcttcctcttcatcatcgatggcaaaatatgggttatgcgcctctggcttgaatttatacccagtaaacacataaaaggcaagagtggccaattctccggccaacacagcggtccatagatacttatacgaagtaatcgtctccaaagcataaaccacaacacgagtgaagtaaatataacagatcaccacaacgtaatactgcctaaacagagtcaatttcatcaaattcaccgcagctttcccatccgttc

SEQ ID NO: 16136 - DNA, 547 bp, Gossypium hirsutum
  Clone ID: LIB3829-015-Q1-N6-B6
gcaaactagtactattttctatctagattgattgcttcagaaatccgtgacccgtgaatattcatgtcagacatagctattacagtattcaaatatgcatagattaaaaagcctaatcatggccttaaagttctgtttaaagaataagatgcatgttgctgatggttttcaacattcaacaaaaggatgagttacaaatataagggtagtctatgaaaatagcaattagaggaggcttgaattactggctttagatgccgaatttccttaagctatcgcattaggattcattgggtgacttggaatcatcttttaccgcaggaggaactggaggaggagagttctctgcacccatctctgctttgagatcattgatgctttgttctagctcatctatcctgctgcccatctcatcgatcttcgtgatgatggaatcagacattgtttggaaccttgattgcatctgttgaagtagattctggacgaaaagtgccatatccgtagtgtcctgttttgaatctacagaatcattcccatccattatcga

SEQ ID NO: 16137 - DNA, 521 bp, Gossypium hirsutum
  Clone ID: LIB3829-015-Q1-N6-B7
ctcctaatgatgataactccttgaaggtagagacaactttttgcttatttctcagatgatgttaactgttataataattaagttagacaatatttaggggtgcacaatggtaatggttcacactatgaatagtgtagaggctaagctcatgtaaattccaggtgctggtaaaaattcttccctatacatcacgaagagtgacattaaggcttccttgatgttcttcacaaaatccaggcatataggcttcatactgggaccagcttcaaagcagcagcgatcggcatgctgaaaaacccgatcggttggcggctcggttgcaagtgcaagtgctcctaaagtatccatgatcatattcacccacaatagctgaacagctgtcagaggagcactccctgtcaaacatgctgaggagaagttaacaattaaggcaacaatgttgacagtcagttgaaactgtacaaatttctgaatatttatgtacactgaacggccccatttggccactgtcagaattgttg

SEQ ID NO: 16138 - DNA, 537 bp, Gossypium hirsutum
  Clone ID: LIB3829-015-Q1-N6-B8
aaactgcaacgtgttaaatcctttattcttatatatataatgcaactaatgcattgatacaaacatgaaagtcataagcatatacatatataacaacataataaaaaaccctaattaacacacaaatattgattaacgctaactaatccatgcaagagcaaagcgttaatcctttattctcatatatatatatataatgcatgatagcataaataaaaaaaccctaagtaaaacaaaaacattgattaacgctaactattatttaattttcgcccccactaatgaacatgttagcgccgttgcttatactgagttacgaggtcatcaagtgtccaaagctccagtgagtcagtcccaccgttaccactcagctgagtcatagtctcatggttagtctccaaacccaggaatgattccaggctccagatttgttctttcaactccaactcactctccaccacttcaatcggcttataatcttcacttcttccatacccaagacccataggataaggtggtgagtcagtctggaaactc

SEQ ID NO: 16139 - DNA, 382 bp, Gossypium hirsutum
  Clone ID: LIB3829-015-Q1-N6-B9
atccaaatgaaagctggagcattatagatgtcgaatactaggaacataaaatctaagtagcacacactagtggataaaatgcttcaagaaactgacaaaccaaaaggggtttgcttaggtcctttgcttgagggggccttcattggcaagcttgaaaagacgagcctgagctgctgcagcgctgtttgaaccaagtgctgcaacaaaagtctccctaacttgcttagtcgaaaatgggaacctattattcaccatggagttgaaaaatgaggctgttccttctcggtaaagcgccccaagtccatcagtacgtgtgtttgaaagtgcttggggcaagctcatgcttgttccaagtccaggaacgttggtcacgccaaatgcg

SEQ ID NO: 16140 - DNA, 541 bp, Gossypium hirsutum
  Clone ID: LIB3829-015-Q1-N6-C1
aagatcaaaatgcatgcttcatttgaaggacatgaggtgatagaaattcataatcaaaatggatgacaaacgccacacggttttgccttcatttgtagaacatgaagttattcgaatattatcacaataacacaacaatcaaacaccataatcattggggaagcgtcagagcgcttcacttgagcagccccttagacttcaaatattccacggtttggtcgtagatttcctcgatcccatacttaaagctgaacctttcgctaataagcttctctgaggaaatgatcaacttgggtttggaggggaaatctccaaaatcggtagggactttgaagtcagggtatctttcgttgaggaacttagctagttctggcacactggtattgacagcactgcatatatatcgacccgatgcagattctttttcagccagaaaaacatgggctcggcatacgtcttccacatgtgtgatagagatcgaacctgacagcatctgcattcctttcaaagcatttatgaggaattcattgcctgaaatcaa

SEQ ID NO: 16141 - DNA, 449 bp, Gossypium hirsutum
  Clone ID: LIB3829-015-Q1-N6-C10
ctgcatacagccatatgaatattttgcataataaatggggggcattgattaatccctcgaccatattcctccctaccgagggaccatgcacaaccaacaaccccaataggagaaccaggagcgtcacctcttatacaaaagaccatattccgaaaagactcgaattgcaactatggcaatcttcctgagactgaaaactaccttactgcacaatgcaggaaccaccacagggattccggcttatggcatcggtaagattactgctcccacaaaacgcttccaaggttcccttagcctcttgagacagagtctccgctaaggcactggatggtggaatgagcccaacttaaagggaaccaaacagctaaagcgagatttcaaatagatagcccattgtgctccccactgatccacattctttatacccaaggtaaaggcccacagccaaa

SEQ ID NO: 16142 - DNA, 538 bp, Gossypium hirsutum
  unsure (1)..(538): unsure at all n locations; Clone ID: LIB3829-015-Q1-N6-C11
gaaagcaaagttgcatctttttttgattaattaattgaaaaccagatgcagcaaaactggactgcaccaatggcaaaatatcatctcccacacaatccccatcaccttattcaaaccccatttggtcttcttcaagcagagacctcatttctcttccaccaaaacttaccatccaccccacacacaaactcctaccaaaatcaaaatctaaccatctaaccacaaatcatcaataaattttagtaaaaacaaaccatcccgttgtatggttcctttttctagtccaactctctcctcttcttntttttaactctctctccctctctcgtattctctcctcagtacctgtagtgagggggcttgtaaggaccctcaatggggacgctaatgtagtcagcttgatccttggtgagcttggtgaggttagccccaagctttccaaggtgaagagcagccaccttctcatcaaggtgcttaggcaaaacgtacaccttcttctcgtacttgcctgttgccttctccttccacagctccagct

SEQ ID NO: 16143 - DNA, 540 bp, Gossypium hirsutum
  Clone ID: LIB3829-015-Q1-N6-C12
ttctttttttttttttttttttttttttttttttttttttttttttttttttttttttttttaaataccccaaaaaaaacagcccttttcatttaaaggcctcgaaattaactaacaaaggccccaaacaaattggaaaacaagctaacaggtgcttcaaaaggccgaaaaatctacgggttagggttcatataaaaacatggtggggttaataaacttcctccattttggtgccttggggatcagcatcctccaaggggggcatataaacataagtttcagtttcacctgcatccttgtaaatgctcaagccgggtttcagcatcctggggatcctggggccaaaggggttaggggcatcaagggtgaacccaggaggtcaggaaagccgtcccaaaaagaaaggaaaacaagggccttcacaaatttattatttttggcgggatgggctttttttttaagcttttccatgagggggttctccggggttgatctccatcggctttttgcttgacatggaaccagccttgctgttatccc

SEQ ID NO: 16144 - DNA, 545 bp, Gossypium hirsutum
  Clone ID: LIB3829-015-Q1-N6-C2
cggtctcaaaagctgcggcacacattttatataaggtaacaactcacgtaaataagtaaaatatcttctaatgtaacaaccaaaccaaaataacataagagcatagggctcaatgaaaacctccaaacaaaataaaagcaatccttacaacattttaaacaaaatctttaaaaaggtttgaaaatgctaagagaagcaactaaaagtatcactacatgttccttaatactatatgattactcattggaaggcacaacatgcatgcatgaatgttggtcttagtatcgaccaattccccaaactctgattacaccatctgtataaccactaaataaggtgcttccatctgcactccagttcaagcttgtgcagtatatcaccttcttcttgtttgcattgtcggtgacatcagatttctcagcctcagctttgagatcaaccttcaagtcttccacaatactcttactttccagatcccagatcttgatgctctgctcagtggcagcacaaagccagtacctgttggggctaaagcaaagcgaatg

SEQ ID NO: 16145 - DNA, 538 bp, Gossypium hirsutum
  Clone ID: LIB3829-015-Q1-N6-C3
ggcaaaaagactaattaagacttcataaatcatccaaaacttagagcaatcaaagtacatcaacgagaactatgagaaacaataaagcagataatgtaaactgtcaataatcctatatgtttatgctttaatacaaataaccttagtcgaagagactgaatcccatatcgtcatcagactcttcttcaggttcaggtttcttttcctcctcggcaggggcagcagcaggagcagcaccaccaccaccaccagcaacaggggcagcgacaacagcaaacttacttggatccgccaagtactccttcactttatcagcctgggggaaggaatactcagttgcaacagcaacggccaatacattcttgtagccattgatgaacatgtgtggtgcagcagccagggttgggtacgagatggcgagagacaatgccgtaaccatggagacaccagtagcgaatttctcaatcaggtcatcctcagtaaggtcaagcacctcagggctaaagactgacccattgtcataaacagacaagacaac

SEQ ID NO: 16146 - DNA, 554 bp, Gossypium hirsutum
  unsure (1)..(554): unsure at all n locations; Clone ID: LIB3829-015-Q1-N6-C4
accatctaagtagttatttaaattcaatgatgtaaaaccctgttcctcacatgcctcttgtctactcaaattaacagccattgtgaatttttttttatgtaaattaaatcaatctccagtccacccatatcctactgtagggtacctttttgagaaaaattttacagaacccaaggtttacaaagaaatccccatccatgcctgcatcccttaaaacaatcagagactgcagattttaacatcttcttcatcccttagctcgagcagcaaccccctttctttattgcagacacgtctttactgacatcaattttctcccccttggatggaacagctgaagcagccccttcatcacttgtctccattgccttcttgcttactatgtgatagatctgtgtcagcacttctgcaaatgcgttttccacgtttgttgcttccagggctgaagtttccatgaagtagagggattctttctccgcaaaggattttgcatcctcagttgggacagccacaaggtgtcnggagatctgatttgttgcctatgagcatgacca

SEQ ID NO: 16147 - DNA, 538 bp, Gossypium hirsutum
  Clone ID: LIB3829-015-Q1-N6-C5
ggcaatggaattctgataattggatttatgacttttgtattaattcagattctataatataaacagataaaaaagaatatttgaagttccaaatgatccaatcaaaaatgtgtttggatttttgtctctcttaggaaggtgaacttgcttgaccatctgagaaactatggatgctagtctgttgtttattactattactgttctttctcttcaacatctccttaatctcttcttctttcttatctacaaagtcaataatctgcttgaagcttgttgagcggatggaccgtcgacttgacctcgacggttcgatcgtctcaatctcactttcctcatcttcggggctgaatctgcggtactgtgtaaagactctacagcagaatatggtaagagccagtacgcaagcaatgccacaaatgaggaacaggccccaaaagctgttaagggaaagttggttctcgtccacttggttgacctgactcgagcagtcgctgtgtgtcagccatttgttatggattttctggagatccccgttttc

SEQ ID NO: 16148 - DNA, 531 bp, Gossypium hirsutum
  Clone ID: LIB3829-015-Q1-N6-C6
aatggaagattgatcctgcttttctttactgtaacttagaatctgaatcgaattccacaccgcaatggactgtgctacgtacatgagcatttaagatattaaaatctcaaaaatggaaaggcaaaactgtcttgtttaacaataacagtcagaaggaaatacttgtaattcttcacatgtgtgcatgatttcatagtgaaattcagcaatatacagatataatgaagttgtctgagtaaagccaatctcttagctgtaaggtccagtctcaggaaatctgaaatcattttttcggggctgtgctacagttttttgtaaactccatctgcttctgtagaaacccacctggtcttgatatcaggtggatgcgggaacgaggaccttcaaacttccagttatcttcatccaatgatttaacctcttcattgagtgcagccatcaaatcagattttaaaacgagcatggcctcatctttgcggtcttgaatggatataagatcagaagggaaatgggaatcctccaaagcagcat

SEQ ID NO: 16149 - DNA, 460 bp, Gossypium hirsutum
  Clone ID: LIB3829-015-Q1-N6-C7
gggcccaaaaacaaaaaaaattcggggggggtttttttttttttttttgggggggaaaaaaaaaaaccccccggggggggggaaaaatttttaaaaaaaaaaaaaaaagggggttcaaaaaaaaaccggggtaagtttcccccccccccaaaaaaaaaaaaaaaaagggggggcaccccctgggggccctcccataaaaagggggcccccaccccaacacctgggtttaaaaaaaagcaagggaacccagggggggggggttcccccccggggaaagggggggaaaaaccccggggcccaaaaatttaaggggggaaaacccaaaggggggggggggggccaaaacaaacccgatttttgagccgggggggcccgaaaaaaaccggcaaaaatggggtaaaaacgggggcccctaggccaggggggccccccccccccaggggacccacccaggcccccc

SEQ ID NO: 16150 - DNA, 513 bp, Gossypium hirsutum
  unsure (1)..(513): unsure at all n locations; Clone ID: LIB3829-015-Q1-N6-C8
accaaaatgtaaaaattcaataatgaaaaaatactgtttgngaaacaacaacaaaaataaaggggaaaatactgtacatgttaggagctaacagaaaaagcgtgacaaaattttccggcaggcaaaaaaaacattgatcttttttacagacacagacagtgaatgaacggtgactcttctgccggaaaaaaacatcacgagcagctatctacagtgacccggcattgattttccaagcaaaactcagcagctcagtgcctcgtacttcacctgaatcggacgattaaacccagcttgtgatagcaaactcccgaccgcagcgagatccctgcaaaacacaccttgaaaggcatttgttgtggctttgttttcacccgaattaaccctgtcattgaaacccgtttcaggttccaatttaaagttacaacactgtgtttgctgcacttgaattgctgcttgtaaagccgccgcaactttcttcctttgcttctcagccgcttcttcatccacaat

SEQ ID NO: 16151 - DNA, 517 bp, Gossypium hirsutum
  unsure (1)..(517): unsure at all n locations; Clone ID: LIB3829-015-Q1-N6-C9
acttacacaagataaatatttatccactaatataccatctatccttaaacagcgtcaccagtgggaaaaataagtattttgctctactaatcgcaactgggaaggcacctttcctagttcaaatctcgaatctacctaattagctattgaaaagcaagcctctacctttgacccttaacaagcgagatcacgaacatttttctgaggataaagggaacacacaaaaacaaacctagatcaattgcatataaactactccttaaacgatgcggtgataagcgatttgggaatgagtggaatgacacctccgtcttgccatagctcctttgatcaaggtgtaaaccatcttcatcccacagnaggcgagctgcaaatgcctatgcgtagtactctcaaccctcaaagacttgcttgcattacctgccaatactaggacttctgcggacaggcatcccagactggcatggtgcgcacactgaagctgtggctccaaccctttcattagcactaaccctag

SEQ ID NO: 16152 - DNA, 547 bp, Gossypium hirsutum
  Clone ID: LIB3829-015-Q1-N6-D1
ctagaaactggaaaaagtaagatatcccaccttgactcgtccacgataacaatgattgttttcggggatcaacctaacccatatctcagttatcatcgatatcaacctatcaaaaatagcaatgactaaagctaagcttcgctaactatgagagtttggacggatacagaaacttaatgggtgaacaggaacaacactcttacatagggcctgtaactaacaagtcaccctccctactgctgcttccgcccatcccctttaaaagatcttgaaaagcaagccaccgtgagtggcaaagaagggagcaaatacgagtgactcgactgccataagcttgatcaggatgttgagtgaagggccagaggtatccttgagtggatcaccaaccgtgtcaccaatgacagctgccttgtgaggatccgatccttttggacccagggtcctcgcgtgctctgaggcaccagcctcaatgtacttcttggcattatcccatgcaccaccagtgttggaagcagatattgcaatctgaacaccagagacaagggca

SEQ ID NO: 16153 - DNA, 492 bp, Gossypium hirsutum
  Clone ID: LIB3829-015-Q1-N6-D10
aaaaaaaaaaaagcctattagcaccctttatttattaagacgtattggggagttacaaacttttgatacacgaagcccttgaaaaaaaagcattgagaaaagaaccaaaggtgcttaagctacaattttatatctgcatatcaccttacaccttaaaacccttccttgaacatagaatcctggcattaccattattttaacccgactccctccatgggacttttgcctttccatcaacatattttccatgtactggggatcaaagggtgtattttcttcaacccttaaaatccctaatgggggactgaatgagaaagctagtaaatgaagcaaccatttgcatttagctgcaacgaaaaaagcttgaagcagctgttcaggccagggtctggtccaattcaacggtgaaatgattaaactcatcttctgatcacaaaacttactgaattcttcactggaatatttagtccctttcctaaccactttattcca

SEQ ID NO: 16154 - DNA, 488 bp, Gossypium hirsutum
  Clone ID: LIB3829-015-Q1-N6-D12
aaaatatgtatacatatacttaacattcagatctagacacagtatttatcccaaatgaaagctgtagcatgtatagatgcacgaatattaggaacataaagtctaagtagcacacactagtggctaaaatgctccaagaaactgacaaaccaaaggggtttgcttatgaccttgggttgaggtggactccattggcaagcttgaagagacgagcctgagctgctgcagcgctgttagaaccaagtgctgcaacagaagtcttcctgacttgcttaggcgagaatgggaacctattattgaccttggagtcgagaaatgaggctgttccttcccggataagcgccccaagtccatcattacagcgagttttgaaagtgctcggggcaagctgatgcttggtccaagttcaggagcagttggtcacgccaaatgcgttgcctacagtgccctaccaaccattcagaccgcatatcacccgaggggtgact

SEQ ID NO: 16155 - DNA, 539 bp, Gossypium hirsutum
  Clone ID: LIB3829-015-Q1-N6-D2
aaacagtacaacatttttctacaactaaatcctacatgggggtagtctcgagtttagacattgttatgcttaccatcatgattactacttcacaatcacctagtactagagttctgatcaacattagagatacagcttcttactttgggcaaaagcaagaagcacggcagttattaattaaacacacagatatcgctaccattaaacggttagtgattacaaacaaaccatttagaaataaaaacttaaatgggtcggtagtcagcgtatcagtggttaccatcgccagagtagtgtcatcattgcctatcggtagtaagcctgctgatatgctggtgccaaaccattaccatagcccccgtatgcaggatagttcatgggagctccagggtatgaaccagcaaggggaggaggggctgcttctggtgagtaagcataggggttggtgggtgggctcctgcttccatacatgggaggtggggatgggtatcctgggactggagtagggtactgggtgtgggaggggagaccttacaaat

SEQ ID NO: 16156 - DNA, 549 bp, Gossypium hirsutum
  Clone ID: LIB3829-015-Q1-N6-D3
aggaggatagaagttcttccatctttccattatgcacaaaagctctaaatacaataggaatacagagttttgtttgatttttagctcagccgattgccatttctgaggtagagtgaagaccttcctctttatgctttactctcagacctaatattatatatattttaccaatagattctacaaataccctcatttaacttataaattctcattgagaatagtggacatcagcagccctcggacgaattcacaccttcgagccttctcctcgtgctcttggtctgacagttgtgactgttgaggctttctttctagagattctttatctgtgctttccttgtctgcacttgattcagcaatagagagagactgcaagcttaaaggctcatcagctgtgggtggattgaacataaatgatgacaataatggatcagcttcgacattggagggagaaacaaagcatgaagatcccccgagaagggcatgcaagtttccatctctcggttcttttctcaacatagaaaatgtcaaattggatccaccttttgc

SEQ ID NO: 16157 - DNA, 521 bp, Gossypium hirsutum
  Clone ID: LIB3829-015-Q1-N6-D4
aacaataatttatacaagaccattagatcttgcgaatattctgaatatcattaatttggaaatttgattcacactatgcttgattggaaaaaaagaattgcactcatggcaaagcttgtcttcggaggaaacagtattgatcccatcaatggtatatgctattgcaatatatgtaagcaattacttgagatttcaaaacataactgctggaacatatctcagatgttttagcggactgaattgaggtgggcatagtgggaattatgaagcagaatgagtttcaaacccttgatatctcctcccttggatggcttctttaggggacaacggttgtatttgcccctcaaaactacatcatccatcactgaccaggtgtgtcctctaggagagctgtctgcccacatgaaccgctctgagaaggggttcaccacactctcccggaattcttgcactgtctcacacatcaaaccctctgccatggcctttgatcttagagtaacatcattactcagcaccaccaa

SEQ ID NO: 16158 - DNA, 543 bp, Gossypium hirsutum
  Clone ID: LIB3829-015-Q1-N6-D5
gcaactccgaaaaatctataaaaagcagataatagccaaatgtttccattttttttcatcatgtttttaagatacaggcatacattggagagcagatatgcacacttcaggcacagtattcatcatacaatttgaagaaaaacactgctacaaacaacgacttttagataaactttacaaaggtaaaaacatcattagcacaaattcatagcggccacctgttggagagatcttggctgatgatcagatgacccagaaccaagctatgactgatcctgatgccagaccaactactagaaacaacaccataacgatgccagaagtctctgcgtgttgtatctggacagatttgggagccatgatcattaacacacttgtcaagtagccattagttagccctagaaggcaagtcagtaacgagactggaaactctgttcggaagagctgaggaccgtgcaagcaacctaagaagagaggaaagaacagtaacctcacaacacaagcggaaatcgcaagctttgcattttcaaggagatagactgc

SEQ ID NO: 16159 - DNA, 544 bp, Gossypium hirsutum
  Clone ID: LIB3829-015-Q1-N6-D6
aagtataagacagtaatattatttgaacatcaaactttaatcaatacagtaactaaagatgtggttcactgaccatttcagcaccacaaaacactgtgttcattcaacaccacaagctactaatggctttcgccacttaaaacacccacagttccatagaaatgaaaattatgaaaacaagcacaagacacccaattagaaaccaccacggaggcgaaggacaagatgcagagtggattccttctgaatattgtagtctgctaaagttcgaccatcctccaactgctttccagcaaagatcaacctctgctggtccggaggaatcccctccttgtcctgaatcttagatttcacattgtcaatcgtgtccgagctctccacctccagggtgatggttttcccagtcaaggtcttcacaaatatctgcattcctcctctaaggcgcaaaaccaaatgcagggtggattccttttggatgttatagtccgcaagcgtcctcccatcctcaagctgctttccggcaaaaatcaacctctgctggtct

SEQ ID NO: 16160 - DNA, 534 bp, Gossypium hirsutum
  Clone ID: LIB3829-015-Q1-N6-D7
aaaagccaacaaataattagattagaatcaaaggaaggatggcacatgaaagtaatattatatataaataagagacgacttcaaactgcagctgaaactggaacctctttacagctgctatgcttttctactttccctaattacttggtaattatttttttctattcttttcaacttcatttatttacaagaatggacctatactcttctctcacccactcacaaatacctacaaatgtacagttagttaataatcaatcagaatgagaacccacccaatctcacccattctccaccaggaaaatacaaagctctatcaagtcatatccaagctccactccctgtgtccaaatcaaaggagttcaggttcgtacaggaatcacatcttccagattgagaatgaacattaagctttcggtggttgatactcaactcgaatcaactgctaactccttggccatccttgcagctgagagccccgtggcacttttaactgctacacaagacacttcagtataagttttgcttcttttc

SEQ ID NO: 16161 - DNA, 544 bp, Gossypium hirsutum
  Clone ID: LIB3829-015-Q1-N6-D8
aataggagctatagtttgattgaataacattgcattaaaacagctcgctgcgctcccccactggtgccagcctcatcaaacctagcatacaactttttcatttgatatcccagtacatacctgccagctcacttcacaagaccactactgctactgatacatatagcagatgatacgacatgctgatttatggtcgtggaccatgaatcccttgagtttgcttgaacgggatgagcaatcatgtgccatgggagttggataaaaaaccgcggccacagtactacgaacggccaacaccgtggcgcaacctttcttagagcacagtacagggacctattctgactttaccgccaatctatggcggaagtacacgattgtggcatctaactgttgtgttgctgcatcacatcttcttgaagcattctgaaacgtatctgactgtttgtaattgcccatatatccatgtacctgctttggattttaagcctatggagtctgcacatatctccggcagattaccacgccacatagtcctataccacct

SEQ ID NO: 16162 - DNA, 408 bp, Gossypium hirsutum
  Clone ID: LIB3829-015-Q1-N6-D9
gtacttggtgcttggagccatggttctgagcaaaattcccagggtgtggttttttccaaaaagcagaactagaaaggagggggccgcagatagagaatgcccgcatcactgagtatcaggaacaagcggattatgcacgggataagacaaaggagccgaaggacacacttggtcttctgcgaaactgaggggaagaaaacaagactatgatggcactgggacatgacagagagaggggaagctacggctagacaccgcggaagctagtaaattccaggggcgccgcagctaaggacgatgctccccaagactgatgtggccgacggactaatgatgactacactaaggagcaacgacccaaaaaaagaaaaggggggcggccgccgactagggagcccggagacccgg

SEQ ID NO: 16163 - DNA, 531 bp, Gossypium hirsutum
  Clone ID: LIB3829-015-Q1-N6-E1
ccctaaacaaattaaaatggggattttaatttaaaaccaaaaacagaagagtattttccatttaaagccactcatcaatcaaatgcttgaatttttagtttatagttcatggcaaaaaggcccccgccgtctgctgccaccagcatgttcccctataactagattttttttaataatatttaaaaggaaaaaagaaactaaaatctagcattttcgaagccgtgtaaatcgctgactctattcaacgacttcttcatcatggccactttagccaacttctcagccgctctccaagccgaaaacggcgtaagtggctccccgttttcatccatcaccactgtcatcgactcccttcccctttccctttccctttcgttcaccctccgtcgttggatttccatcatctgctgtttcctccaatgcaattccgccaactcaacttctaaccctctggcatactcttcggccgactgcgaattcgactgcatcaacaaggctcgagccgagcccaacaaatggtaagcgcttgtc

SEQ ID NO: 16164 - DNA, 538 bp, Gossypium hirsutum
  Clone ID: LIB3829-015-Q1-N6-E10
caaacttagaatttgacaatattgaatttcatgttatcaataaattctagtcccgcaaacaaatgaacaagaacataacaactaagaacaaggttattcgaaagcaactagtataatcatgtaagaaagacttacggattacaacactctaaaacaggaacttggacctaagtttctctatattaacctaacaagacaataaaatcccaagaagatgcctggaaaatcccctcaactcaaatatggttataccactcaactccatgttctaaaatggctgactgtgacatcttatctactccattattgtttctcagggttgtcaggtacttcttccttttcaggatcttcctcctcttcctctttcttttcttcctcttcttcatcttcttcagggggatcatatggcattggtggtggtaatgggtgttttcatagggctgaattgagggaatatgtcaggtctgcgtccaggcttaggcctctcccactcaatgggaaaatcgaggggattgcgacgagtcaatttttcttcctc

SEQ ID NO: 16165 - DNA, 535 bp, Gossypium hirsutum
  unsure (1)..(535): unsure at all n locations; Clone ID: LIB3829-015-Q1-N6-E11
ggataaaaataaagcaatttatttgagcaacactcttctgacaccatttagaaggagcaagaaggaagagcagaaaaggctcttctagtgatttaatgttgtacatttacaaaaaggagcttcaggtcattgtgggatttgttcaggctgcaaagagattgaagaccgtctgcaaatgaccctgatgagaatgttcagacgggttttgagttgggttgtcaatgctaacagaaacttggtatcctaatgtccttgtcccttagtagctatatctgtaatatatatatatgtatgtatgtacttgtggcttgtttatctttgcagtcccgctgttgagtaggttaatatttacttgaagctatagaggttctttcttcctttttggtagattagttatatgtagatatgatccaaaactgagttacaagagctctaagaaatccttgtgacttcctctctatgtactgcagacttggtgaagtggatttcttaagatgtaannnnnnnnnnnnaaaaaaaaaaaaaaaaagggcgg

SEQ ID NO: 16166 - DNA, 519 bp, Gossypium hirsutum
  Clone ID: LIB3829-015-Q1-N6-E12
actgaagctcacaaatctaattaaatttcaaaaaaaaaggagcttctttgcatatggagagtgcttagacaaatacagggaaaatagcagcacctaaacctgcttaacaattgtagtttatatgatttacaatgatgaaaaaaaaaaaaaaagtccctcttgcatgattcaacaaccttcatgttcccatctactgtacttggactctataccatgtctgaattattgtactgataaacttcaaggaatatgaaaagtcaattacctttctacacctacatcgcccacttggattcaggcaacagtgtcaaatcctctgaaacccatctcaaaactggaggatgttttcgaacaccctgatttcatcaaacactaacatacatatatttacatcctaacaaagcaatggtccaagcatgtcctcgtccctggtcgcatgcactaattgttttgtccatatacccccttataccctgtcgaacaaacacctgcgttattgttactgcaaactcaccaact

SEQ ID NO: 16167 - DNA, 543 bp, Gossypium hirsutum
  Clone ID: LIB3829-015-Q1-N6-E2
ggcctccaactttagcattattgttctattgattttctcaaaataaaaacacttcatatgctacataattatatatatatatattacaataacattccttcctcaattaaaaacaaaaacaaaagaggaaacaatgatcacacattaagctcttcttcctcttcctaaatacattaatggctattcttaagtactacaattactgccacacacacagacatatataagggtgagatccatgcaagtccaccattttttcttcttcatttgaccttcggaatttttcatgcttgacgattcccggtaacggtccaatagtcggggaaaggaacccgacccgactcgatgcgtctaacatcttcaagaagaagctcatagtgcttcttcacttcctcaacagttttctctcccacagctttagcaacattgtaccaacgatctggtgtgtccttgtcgtaaacagctaaagccctttcgaaatctttgttttgcttggctgtccatgaaccagacattgaaatcgatgacattttttttttcttc

SEQ ID NO: 16168 - DNA, 324 bp, Gossypium hirsutum
  unsure (1)..(324): unsure at all n locations; Clone ID: LIB3829-015-Q1-N6-E3
acatggnaaaatttattttcattcataaaccagtgtcccaactgaaatgttcaaaagtacactacaaaacaagcagaatcttttaattcaaaccaacagtaaaaaaggtttcaatgtccacttcccatttgtagatcaagctccaaaccatctgctaatggcttctgattcctcagtttcgtttggtggaggacgcataactgtcttgaagaaggtcatcataaggatccctgcggccggggacttggctaatctgaggatcccaacggagctgagcattgtggcgctcaaatgtccaaaacccataaggccgcagtggataac

SEQ ID NO: 16169 - DNA, 556 bp, Gossypium hirsutum
  Clone ID: LIB3829-015-Q1-N6-E4
gaagtgaaacaaaagaaccatggcttgcatttaatgcttatatcctacaatacctcaacaatatcccatccgtccaaccactacttactctgcctcccaaaaccatacttatagcaaatagcaaaaccaacttcagaggattctttgtactttttaccaaaaaaatagaagaaaactaaaatattatatagaaactttaacgagaccaaatgcaacttgcattccagcagttcacattcatgtggctctcatataggcccgttgccagttgcaatatccctttttatagctccttgaatccatttgataacaaaccactgaagcccaagaataactggaatccacaattttcctttctcactagcgtcagacccatctaccagcttcttgctaactacaatagcttgactcttatttgttgcaacacttgtgatggcttttactaagtttgggatccaagcatcatcattcggaagaatcttttcgtcactgtcatttttattgcacctcccactattttcaaccaaaacaacaggaatgacagaatcatcaaaat

SEQ ID NO: 16170 - DNA, 513 bp, Gossypium hirsutum
  Clone ID: LIB3829-015-Q1-N6-E5
atcaagcaaaaaggaaaaaaagttgactctcttatagttcacaaaccacagagacccacattgggtgaaaactcaaatccggaaacaacataaacgcacgttaatcctagaacagggtgtaaattcgcagctcaatttgagaaatgaagttgagataaattttcaaaaagataatcatggttgtagctctgtgtagcatagagtccagagcagattttattacacttattggaagttctgaagagtactgcaagaataacattaatcttttagctttttggcgatcttgaaccattcagtgtggaaagatccgtccatgtcaaccctttcataagtatgggcgccaaaataatctcgttgagcttgaaccaaattagccggtacacgttccctcctataagtgtcgaaataggcaagactggctgacatgcctggagtgctaatacctgagttgatagcaagacaaacaactcttctccaagcagattgcctgtcaatgatttcctttgcaaa

SEQ ID NO: 16171 - DNA, 554 bp, Gossypium hirsutum
  Clone ID: LIB3829-015-Q1-N6-E6
aataactaccaatgaccaaatgtttcttcaatcaaaaaacaaacaggtccttcaatgtcttagcacaaaacatgattctgggggtccaacaaaaaccaaacttgtcaggttaacaactaaatataacaaataacaacgtctagcaaattaagtagagcctttgctaataccactattactctttgcttgtggttaggacccaatgcaacagagttgagggagtagtagttgcagctccttcttgttttcttctttaagttaaacccaaaagatactttaaaccaccagtttatttggcatccaatggactaccaggcagggtgatataatcaggattaatggacttctggaagtgaagcctactcctgttgctgatagttcttatcatcattccgcaaatattcattgctaccattctcgttgttattattggcagcgtctttctcaaaattatttgcattttcctgttgctccctttcacgattccattgctcaattttagcacgtctctcctcactgccttcacggattgggctatgattcctctttccccc

SEQ ID NO: 16172 - DNA, 547 bp, Gossypium hirsutum
  Clone ID: LIB3829-015-Q1-N6-E7
cataaacaagtacagtgtattatactgttaaaatagtatacgcctctcaaattatcacccattaagatcacccatcgaagacatgcactatgttaaatctgggaaaagagtaaataaaacactgggaagaggtgctgattacataggttgggcaaataaatgtttagctatatataatatatagcccatctacaacctcaactactttatctcatcgtatcaaaattgaacccagagatcactgctactgaaatatcaatacttgcatgtcaaaatcttggagctccaccaatggttgcttcaggaagtcgttcaattgagtacttgtgctgagtgatatacataattggcacaccaggaacctgccaataaataagttttatccatcagagttcagttcaaatgcaatgccagctcgactaactaatcatacatactttacgaatccttctcttcaagtcccgatcacatgtagcaacaatgaagcatttgtgctgtttccaatgaaacacatagttaattagaagtaataatttgcagaatgaat

SEQ ID NO: 16173 - DNA, 533 bp, Gossypium hirsutum
  Clone ID: LIB3829-015-Q1-N6-E8
aatggcaaaaacacccgggcttcggtagacaggaaacgagagggtattacaggagttggaggggggggggctttttttagtttcaaacataattttccatacaaacaagcagggcttggtccactaaatatagaggtgacagttcacgcatatttgattcatacacattaatttaaagaccaaagttatttggaatgaagccctcctttttacatgcgtagtagcaagttaacccatcgcatacttctgggtccagcttcgagccgttgtctcatacttgctcttgtcagtcttgtacatgtgggcaatctccggcaccaatgggtcatcaggattcggatccgtcaatagtgagcagatagatagcaataccttggatatggtgagggcagggctccactgctccttcaaaatatcaaggcaaatgctaccgttgctgttaatatttgggtgaaagacctttgtcctgaatgcaacctttggtggtttaaatggatagtccggagggaaatgaatggtgactagaaacactc

SEQ ID NO: 16174 - DNA, 506 bp, Gossypium hirsutum
  Clone ID: LIB3829-015-Q1-N6-E9
ggcagcatcaaaatatcgaagtaaacactagcattactttaaatcacattgcaaaaactatagctagatctacctggggtacaataaaaccatttgcatcaagtaccaaaatatttaatcgtcttaaaacaaacttatccctaatcaagttcggggggatgcatttccagctccaccttgctgcccggtttgagcagctggcgctgcctcataagtcccacgagggcccccacttgcattgctgtcaaaaggatatgctggaggctgggaataactgctataagaggcgttatattgggctgcataggggggggcaccatatcccggctgcgcagctgcagcaccaccataagcagatgattgaggccgttgcaaacctgattctgcttgtccatagccaaaaaaggaggctgggattgatatcctgcctggccatagcttcctgggggggtaggagactgctgtgtctgcccataggcagggtgattgaccagtggtttctgccc

SEQ ID NO: 16175 - DNA, 371 bp, Gossypium hirsutum
  Clone ID: LIB3829-015-Q1-N6-F1
atcatcaattaacttaattagatccacgttcgacaagaaattgatggattttgaaaagaaaaaggggaaaaaagagggatacatatattcgatgtaaactacaaacatgcaagccttttcagtactcttgataaaccattacctgcaacctttcaagagataggaagaggggcttgagaaactcacggcagttgaggactttctattttcggtaccatttccaggcgttccacattcactaaagtcaaggatgcgacgctccaccaagatatctgaagccaaatgtgattgagtctccatttgattattctctttgtccattttggaattgttggagcgtcttcccttcacaattgattctggagtttcat

SEQ ID NO: 16176 - DNA, 511 bp, Gossypium hirsutum
  Clone ID: LIB3829-015-Q1-N6-F10
gttgtaaagtgaagcttcttgaacctttgcgtagagttcttgagaaaattacatctgaaagattttcagtctaatacatacatgcatatgcctataaatacatagaagctctagtcttaaaattgaggttattatgcttcaagcaatgtcctaaactccctttagtttcatttgactccaacaagctttttagtagaaatgcttgatattccttgttcgggggaatcatggtattgatctgaataggcctcaaatgaaatgaggaaacttatcatcatgattggacggctgtcggttgaggaacatcgactaaacgctctatcatctggagctgatcatagggagcgatctggctaaatccatctggccacctaattgacatagcatggtttcccataggtcgaatttcttcaggttcaatatcttctggaatgtcaccgtactgcagctttttaggaaacctataattgatcttgtgtaatgtcaatttacctcgatctttcaatcacat

SEQ ID NO: 16177 - DNA, 539 bp, Gossypium hirsutum
  unsure (1)..(539): unsure at all n locations; Clone ID: LIB3829-015-Q1-N6-F11
gacagtatgatccttctgttttttttacttctatgttggcttttttactgtggtccaaacttgactactgaaaacaaatttataacaatattacaagaagagaaacatagcctttttatgtatgcattttgtatggtagtaaactagtgagtaaaaatataaatatttgatgatgatgatgatgatgtccgaagctatattccaacggggcaagtcggaccgccagtccctgtgtacataccgattgtcccttgtccggatgagaacctggggatttggcagttgaaggagttgaaggatgacatgtctaatgcattatttgcaggaagtaaggttgaaggaatccaattattgttagccgagatggttccatccttctccatgaccgcattgttgaaagacaggtactctttataggctttcccaggagacgcaaacggactatcaggnaaggttatgccaaactttctggcagattaccatcttcacaatgagggctctccttctcactaccattctcttcagaactgactgtttct

SEQ ID NO: 16178 - DNA, 529 bp, Gossypium hirsutum
  Clone ID: LIB3829-015-Q1-N6-F12
acatccaccttttacttattattattgtaaacgggccaatttgcccgggcccaccaaaatacagaataaacaaaaattaaaccccaaacccaactacataactcaagacccaaacaagcccaataactaaacctagacccaataactaaacctagacccaaattcaaacctaaacccaataactaaacctagacccaaattacaagcccgataggcccattgttttgagaacagaaaccctagggtttcttccccacttttgcgttgcaaccaggcagccaagccccagccctcgcgtcgtacaactgccagctgcctccgtacgcctcatcaacgccacgcccacgcctccatacgccagtacagcctcgtacacgcgccatgcacccgtaccccgctactaggccgtcggctccctttagcttcgtcgaaatcggagttaagagggaaatctatggctaaaataggccatacttcgaagcctggagcaccggtcaccgtacattgcagtgggcttggtagttttttg

SEQ ID NO: 16179 - DNA, 548 bp, Gossypium hirsutum
  Clone ID: LIB3829-015-Q1-N6-F2
aataaaagcacatagtagatttaattcattacataaaaacagaacgctgcgctcccccactcataacagcataatcaaacctagcatacccaaatattcaaatggaaaacacagtacaaagctgccagttttattcttagatcagtactgatagtaatagtaatagcagacgattcgacatgggattttcttgccatggtctatccattaattaagtttccttgcggagatgagcagccatgtccgctgtgagttcgataaagaactggagcagagactcgggatgtccaataccctcgtgcagcttttcataatccagagtccagtgcactatactgcctttaccgtcgctcttgggggaagtttggattgtaatcacgaagcttttgtattcctccatcagatctccttcaagcattttgaaagttattgactttttctcatggtccataacttcaactacctgctttgcagttttagcctttccatcatgcacatatctccagcagataacgacgccgggagttccaaattcaccttcatgtaaa

SEQ ID NO: 16180 - DNA, 499 bp, Gossypium hirsutum
  Clone ID: LIB3829-015-Q1-N6-F3
atccaataataaaagggtcttccttttcaaatccataagtgacacaagtacttacagtcatcaaaactacactgacaaaatggaggggaaaacactaaccctaaattcccaaattccatcaaattcaagaactagtaaatttggtcacggctttggtgccttcggaaacggcgtgtttcgcaagttctccaggaagaacaagtctaacagcggtctggatttccctggaagtgatggtgggcttcttgttgtaccttgccagtcttgaagactcttgggcgagtttctcgaagatgtcattgatgaaactgttcatgattcccatagctttgcttgagataccgatatctggatggacttgcttcaggaccttgaagatgtagatcttgtaggtctcaacactcttcttggctttcttcttcttcttatctccggcacctggaccttccttgggaagcttcttgccggcctttggcttcttctccgctggggctttctc

SEQ ID NO: 16181 - DNA, 448 bp, Gossypium hirsutum
  Clone ID: LIB3829-015-Q1-N6-F4
aaacaaccaaagccactactggggggcaaagcaactttcgattaagcaaaaacacatttaaacagactataccaaacatgagcttttggccattaacatatcaaaccccccacttcatcatcacatcacattgaacctaccactaccatcatggcctaaaagatgattagaaaaaacaaaaaaccaatacatttgctctaaaaaaaaacaaaagtttcttttttctaagcgactgatccacacacatggaaaattaagcaccctctcctttgatcctacaagccaactggatgtccttgggcataattgggacccccttggcggggatcgcacaaagggtggggtcttcaaaaaaacccacaagggatgcctctgcagcttcctggaaagctaaaacagcatggctctggaaacccaaatcagtcttgaaagccctgggcaatttcac

SEQ ID NO: 16182 - DNA, 553 bp, Gossypium hirsutum
  Clone ID: LIB3829-015-Q1-N6-F5
gttaaatgatagaagccatagcttaggtttatataattggcaatagaatttgaaagaaaaataagttatagaagtcctctaacgtagaaataacgaagcaattcacataacaaatagcagacaacatcacatttcatatgcaaataaatccaaacccacacactagacatcctcctcatcctcccgatacatcttcatcatctcagcacagccaacttcagccttgtcaaccatgaagcccatgctattggcataacgggtggtggatgaaatgccattggagttggtcaagataacacgggcacgttcacgaccgggggacattgtggcacatccaagctgggggctcttcacaagaactgcatcacagatctgatccaagtgatcctcggatacacgaatctggtattttccggttttgtcggtatatccctccttctcgaaaacaactccgccggtcttcctgtcggagcataccagcttaaccatggcatcagctagccttctagtcttaggggtttcaaaaccagcacggcaagtatcacagtacaca

SEQ ID NO: 16183 - DNA, 540 bp, Gossypium hirsutum
  unsure (1)..(540): unsure at all n locations; Clone ID: LIB3829-015-Q1-N6-F6
atcacagccgtttttattttaaataaattaaaatataaatgggaaaataagttatggtttntgaacgtaatacgaatcttaacatgacacattttatcacacttctatagaaattttaacccatttaccactcgtgtactattaatcacactatcatatcacattatggtacgagacaacaaatactgaccttctaaaacccgaaaaactctggactcaaaacaactgaggcaaataccgaaacctggtaaactagcatgcctgtttacactaaaggggcgctgtataaacagtgacaagcttaagaaacacctcccaaggcccttgcattgtactatttcacatgtaatttttttggtttaagacaagcaaaataccttgcccacaacttttctggtctcaatggtacctattcccctctgtactggaaaccaggtctcaatagacttacccaagcaccttcttcacaacagtggactctggacagacttttatgtaaccagacacatcatggtgccctgaccaaacttcgaccccaag

SEQ ID NO: 16184 - DNA, 432 bp, Gossypium hirsutum
  Clone ID: LIB3829-015-Q1-N6-F7
attggaatctagttttaattatagtgatttttgagttaaaactcaaacaacttctaaaaaaaaacaacatatgaacttgaaagttccaacactttcatcattatttgtatgtttgacacccaagaccttggctagcaatacaagccatatggtatctatatggaagacataactatgctatggaaatacttcaccttttacatacatatgctttcatgcaaacataatcttggatatagtagcaatacaaagattttattttatgcattaacttactagtcacccttcacttttggaggaatccttctcttttttcctttccccttctccttgtcttatctgctggtttcttgccctcgtgttcaccaacacccgagatgtccaaatggactcctggatcattggcagtgtagctgctgccgagcatgatcg

SEQ ID NO: 16185 - DNA, 537 bp, Gossypium hirsutum
  Clone ID: LIB3829-015-Q1-N6-F8
atcggacaataataattaaataaagtctcgtttcaacaatggcgtgaaaaattacaaccggggaacatggctggtttgaggtttgctgactgctattcgatcgatcgagatataaaattatacagcttaaagcttcaaatttgctaaagactcgaaatgcctaccgaatagatgtcaaatgttgttcttattgatctaaatctatcctaccggtaacaattttaagatcagaaggtaaagactcaccttggtctatggtttctcttcctcagatggagagtttggctggtcaggtacggaatcaacaaaaaattcctccacaatatcctcttgctctgaagaatcaagcaaaatttctgaatcagaggcaaggaaaggagaaccaggatagttcccaagggctcctaaatctcccaagtttgacaagtctgctgtcagatctgtaagactgaaattccactgaatctgatccaatgatctaagggaatctctagaattcccggctccattttcaggtcccagctgcaatcctactga

SEQ ID NO: 16186 - DNA, 524 bp, Gossypium hirsutum
  Clone ID: LIB3829-015-Q1-N6-F9
atatcattcgattaaatcgtcaattcttaattcaaccaatcaaattggatcagtgcaacactagttggtccacatgcttttttgcacatcaaccaagccatgggcactcatttccccctaccaacaaaccaagtgacatgaaataaaccattggtacttcaaattttcttccctacctcaacatgcatatgagaaactatggttctcaaacagatttggtttcaacaacttaagattttcaccgtaaaacaattaaagcatttttttcactaattttgttcacatcctagaatgtgaggtttaaacttatctagctcggctaagacttcatctaccggacggtaaatcaaatcaatcatccgccatatctgtagagtaccaccaccattagtgctttcgcaatcatctgacacgctgacaattgtccagggatcagatgtattccaatgaaagtccacaaccttgtccctatgccctgcatgttgaaagaacaatccaggaggagcatttggtgccttcaatcc

SEQ ID NO: 16187 - DNA, 506 bp, Gossypium hirsutum
  Clone ID: LIB3829-015-Q1-N6-G1
atgcatgaatcatcataacttttaaatcattgaaattcatgcatcatacacaggcaacaccatccttacatacatatattacatccatccctacatccaccaagcccatgaccaacatcaagagaaggcaacctggcttatgctaaaaaaaaaagcaatggatcgatcgttacaaaccagtaccattgcaccattactcacctgcacattaacaaactcgttttttggaaaaaaaactgagtaaacaaacattttattcggccacactcggctttttttttggcgaggcattttaaggaagcttgtttgcaaaattgcattgcttcctgatctcacccttgctaccagggagaggattgttctcaaagaggaaagtaatggcccttgaaaaccccttgaaaaaatagtcttggctcttggccattttcttcacataagggctggtccttttggcgtaccccagttggtgatccacaatcaacaaacccttggtggccagtatgttc

SEQ ID NO: 16188 - DNA, 403 bp, Gossypium hirsutum
  Clone ID: LIB3829-015-Q1-N6-G10
aaattaataagagatatttttataaaaatttcttttaaaatgtcttaaaaatgatgcttgttcagttaaaaaacaaactgctgaaagacgccccccccccctacccaaacaaacaacaacaagacgcgccgcccaaacaccaaaatgcctgggaaacgaggccctaaaagggaaagaaaaaaaaggaagaaaggggcccagggaggtggtttaaggggggaaaaaaaattttttgaaaaaaaaggaagccgatgtaaagcatataaaaaaaaaaaaagggggggacaagaaaaaaggggagaaaaaggaaagatttagcgaacccgggcacctgaggcaaaaaaactccagggggggacccttggaggagaacccccccttcgtgggggagagcaccgaaaaa

SEQ ID NO: 16189 - DNA, 517 bp, Gossypium hirsutum
  Clone ID: LIB3829-015-Q1-N6-G11
gcctcaattcttaaatcctttgcaaatacatgcatacatacatccatatatatataatgcaacaagacatgagcctcctaatttctaaattaaaaaaggtaagcatttctttcatctttttcgcacttgaaaaagtgccaatcactcaataccattactgaaagttgatgaaaataaagaacaacaaaagttgccccccactgcccttcattcatctgcccgacttactactctcctttttcatgtactcccaccagggaaagtgcaaccattatagcttgggttgctagaaaaaacatggctgcttgtgaaaaatcacagctcgatggatcccggccagaactttgataatagagattcatcgcatatgctgcatgtgctgatagtgtatttggctcgaaacaagaccctcccggttggattggactacaatctatgccatgtgcacaagcataatccaaacttgcctgcaattcggaatctgtaacatctttctttggaacacaccaagatgctt

SEQ ID NO: 16190 - DNA, 538 bp, Gossypium hirsutum
  Clone ID: LIB3829-015-Q1-N6-G2
cctggcattactaggaaacaatcttagaaacgtagcttatcgccaaccttgctaacattgctttttgtctgacacaaccgaaacgttgtaactgtcccgcgctgaataaacactatttaaacattaccttaacctacgacccaagaagactaaaggcttaacaaaggtgtaagtggcaaaattgatcacgtgaaaccaaaaatgactgcaaaggataaatgggaggaaagaaccatagctccttgcaaaattggcctttgttgatcccgcaaagggagactttgcttacaatgagaggagagcgctctctgaaggacatttatcgacttgaggtcattaacgggcctcaccaaacgtggtgcactctcaacccggtttccgagaacatgagctataaccaggccaccactcaacgcccacatggattttggatttaatgactcttcaaatgaccaacggctagatgccaaagccagtgatggaaaaactacaatctgttttagaacatgggatggattgccccaagcaacattggttt

SEQ ID NO: 16191 - DNA, 556 bp, Gossypium hirsutum
  Clone ID: LIB3829-015-Q1-N6-G3
aatagttgggtgaatgtattgccacataagtggctataattagaaccaaaccaagacttgcttacattatatatatattggccagattgcttacataatatttaaaaagcatataatataataagttttggtgcaacaataaacactgtaactaggaatttaaatagcatcatccacattttttaacccgtcgtcaatgtgtgtaattcttattctcgggactaaatcgacttaagagttagccgaagtggggtttaacccgtgttttgcaagccggcagcaatacccttcatggtcaagatgagggtgtcttctaaaccgggggcgtattcacttgttgggtttagtttcacgagttcatccgcggatttgtttgattccatgatctctttggagatatgtggacggaacttgacatcgtagctcgggtcacggatacgtttgagtgtgtaggcttggcagacatttagtgttgttatgtatgaatctcggagccgtagtctttgcttcaagtacggatcaccttcgagaagatccttgtgcccagcaatttgta

SEQ ID NO: 16192 - DNA, 463 bp, Gossypium hirsutum
  Clone ID: LIB3829-015-Q1-N6-G4
gagtacaattacaaagacatacgtatatatatgtatgtatgtatattttttgttcggtaaattacatcaaaggatccacagcaaaagcttctgtaatatccccactcagtgccagatttgcagacccaattctaattatgattctaaagacagcataaacaatttgcttctaagtcgttctaattctatataagtagttgcaggcagcaggccgagagagtgtgtgagagaaagagacgcactaattaatggccattggaatttatagtctcctcttcattattatccttcctatggctatgctgatacacagacttcctgtgatttatctcttctctgagacagttccagattgattcgtaatgaagaacagcaatgactctccgtttccttcctttgtggggttctcccccacgattcaccactggcaattgttttactccactagcctccatcaactccc

SEQ ID NO: 16193 - DNA, 544 bp, Gossypium hirsutum
  Clone ID: LIB3829-015-Q1-N6-G5
gaagaattgttccaatttcatgaaaccgttaaaattccacagaatttcattaatgatttgcagagactgcaaatacaacaaaatgaacagaaagtacagatttctaattctaggaatcaatcaactaaaaactaacagacctaagctctctctcctctaatcctcctagcaagttggatatctttaggcataatggtaaccctcttagcatgaatagcacacagattagtatcctcgaacagtccgacaaggtaagcttcagcagcctcttgaagagcggcaacggcactgctttggaatctcaaatcagtcttaaaatcttgagcgatttctctcacaagcctctggaatggaagctttcggatcaagagctcggtgctcttctggtacttcctgatttccctaagagccacagttcctggtctgaaacggtgaggcttcttcactcctccggtcgccggtgctgacttccgagcagctttagtggctagctgcttacgtggagccttcccaccggttgattttctagcagtttgcttggtac

SEQ ID NO: 16194 - DNA, 504 bp, Gossypium hirsutum
  Clone ID: LIB3829-015-Q1-N6-G6
acatgtaaactccaatgcaagaaatattatataattccaaaatacatcaacgaagatggttgatgtgattgttataatgttgaaccatgattacaatgtgtattttagtagggcggataatagtaccctcctgcctgccccatgccattcacttgtggcatcccatacggcatcattaccagttgtgcagcagcaccatagtagacggaacttgctgtgatcttggccaaacttgattgcccttgcattccatcccttccgtattgattccatagctgttgctcctgtaccagtagctgctgcttctgctccatgtccgctatctgcacatacgaaggcggtggcactgtaagcgatgcggcaaaaggatcctgctgtcctactggctgcactgtgccatccggggcaggcaaagccagcacttgagtagcggccttgccagggccaggcatcgcaacactacttgcactcccaccacttagctgtctggagctcacatgctga

SEQ ID NO: 16195 - DNA, 532 bp, Gossypium hirsutum
  Clone ID: LIB3829-015-Q1-N6-G8
gaactaactagaaaaaaaagacatgttttactacaatttacaacatacaggaggacttaagtctcaacatttctttacacaaattcacacgtgcatacccgttctatgtgcatgactggaatcgtggagaagctaactcagatgcatatcttttcttgaggcttagaagatgtaaaaatacagatcagcaggctgacacatttgttcattgcttctatgcttcgcacaataatgggctgtttatagtttcgttttctatgactagctattaccatggagtttattttgacttactttgtttcatcggctagaagaaccaaaacctaaaaccatactgagaatggatggattatgcaggaacagtacgtgaggaaccaccttgattggccaagaaacggacgacaacacaagtgatattatctgcactgcctctctggcatgcctcctgcataagccgcttggctgcctgctcaggatcctgtattggctttaccattgccacagcctcctcgtttgtaacaacatcccatag

SEQ ID NO: 16196 - DNA, 543 bp, Gossypium hirsutum
  Clone ID: LIB3829-015-Q1-N6-G9
cagggcacgagtttcttattaatctcttctgccatgtatgacaacatacatagcagaatggagtcgacagtacaggtagactagatcgtttttaaccttatactaacacagcagaagatgggaaaataatacagattcgtgattgtgagatgaatttgagaagctttgtttcaatcaggataagtgagtaaagaaatgagatgctcatgtttggggaagcgagttacaagctcggatcgttttgccagctcgaagtcttggaactggaaagcaggtgcacaggtgcatcctacaagtgaataatggctctcagcatcccttggatcattttttgtcactgccccatcagtcgaaatgttgaaatcttttgttggaaatgcaccaaaccaaacatttggaggcactgtgtactgcaccttctgattattcaacaaatcaggtccaagaacatgttagttttacttgcccatctttctcatccaactccaagaccgtaagaggttctcccaaataaaaatgccaggtctcagcacagggtatacg

SEQ ID NO: 16197 - DNA, 490 bp, Gossypium hirsutum
  unsure (1)..(490): unsure at all n locations; Clone ID: LIB3829-015-Q1-N6-H1
ttttttttaaacaaactataccagacatgagtgttcttaaccattaaaatatcagacatcacactctccaccataaccccattccccataaaaaaaaaaaaaaaaaaaaaaaaaaaaaaaaaaaaaaaaaaaaaaaaaaaaaaaaaaaaaaaaaaaaaaaaaaaaaaaaaaaaaaaaaaaaaaaaaaaaaaaaaaaaaaaaaaaaaaaaaaaaaaaaaaaaaaaaaaaaaaaaaaaaaaaaaaaaaaaaaaaaaaaaaaaaaaaaaaaaaaaaaaaaaaggggggggggcccccccttttttttctttttttgccccccaaaactttgggggggtttgaatccgaggagccccctcaatccaccccaaaaaccaggagcggggggggaaggaaaaaaaaacccccccccctattttttgctttgttttttggggggcgcctggcccagaaaaaaatttttttccaaaaccggggttttgngccctttttt

SEQ ID NO: 16198 - DNA, 521 bp, Gossypium hirsutum
  unsure (1)..(521): unsure at all n locations; Clone ID: LIB3829-015-Q1-N6-H10
aaaatccttacattcatggtttacattcttacaagtttaaccaaccatttagtgagaagtcgcttaatatattacagttacaacaatcaatggactggtgatacctagaaaatcgcgatttagaacgtccttccccatctagcataaatgtaatattttgtacaacatacatagagagtcaatcccacagcactaagcacagcaagcagcaaaaaaaataatcaagatgtgctctattcagattatttgcaaaccagctatctcgaccatccccactggtcaagttctcgatggcggagatgagaaaactacttaagaagcttccaacaccgaagatgctaaggtagagcgcaagaccgacactccttaattcatttggcatctggtcataaaagaattcttgaagaccaaccatgngtgaagacatcagctaatccattacaatgcgtattgagggaccagccaccatacactcattggaaccatcacatttgngcttgtctaacaatccatattcttca

SEQ ID NO: 16199 - DNA, 492 bp, Gossypium hirsutum
  Clone ID: LIB3829-015-Q1-N6-H11
gggcagagaaaaaaattttaattaaagaatttggctttctaacatcagccccccaaatgaaaggggggggtagaccttacaacagcatgcaaatggcagctcaaaaaggaaagcccccctaacaatgacttcgggggggcttttcccccttaaaataatggaagccaaccttggggaccaaaaccccaaatgaaatcacttgtttctctctcaaccgggtttcaaaggaaaccccccaaaaaaatagacctcccgcccaaaagaatggttctatcttttgaaccaagggcaatgcagggagtctatggaatggaatattcacccgcttaacccgccctgattggactgggaattccagccatcaaaaagggtcgttatggtttctgcaaacttcttcgcttgagggccgggtttcaagacatttacctcaccccactgggagcaagtttcactccaccagcttttccggccagtgcaccatgcccctggggc

SEQ ID NO: 16200 - DNA, 430 bp, Gossypium hirsutum
  Clone ID: LIB3829-015-Q1-N6-H12
caaattgccccaaagttcatttttaaaaaataaattgttgcaagggaacggttttcccaaatgtccaatccccaaggaaaaaaaaaaacactccgccaacaactactatttcaaaaactaacggccctggaacaaccgggaggaaaaaaaaaagaaacaaaaacgattccggacgcggggggcaaacaaaaaaacccggacggggacccagaggggaaccaaattgaaataaagggagaaacaaaaaagatgggcgcaggcagggggataggtgaaaacaggggaaaaaaagaacccggccacaatgccaaacaagaggctaccccggagcggaaaggggaagaacccggggggcctaaggagagagggaactcaaactaagggggctagaaaaagcggaccttgttgagggggaaaaacaggcgggcca

SEQ ID NO: 16201 - DNA, 537 bp, Gossypium hirsutum
  Clone ID: LIB3829-015-Q1-N6-H2
acccgtaaaaattccggttagaccgatcttattttttttcgtgaattcatttacaaaatgtcaatggctgggaaatgaatcaagtgagtagtgtgaggaatattacataacgatgtcaatcaaatttgtacatatttttttctttttcttcttgttcttggtcaatggtttacctttttacatcggaacggttgggactgttgcaagtctgtttctgtcgggttcggtgtcagtgatcctcaaagttccgggttgttgcttgccttgttgtttagcttgatgctgagaccagtatgcatgagcagctaataccctgtccaacagttcctgtggtactggctcccctcgtctttgctgtggggaaattttcgccgtgtgaaccaatgttttccatttatccttcaaatccacgtaagttcggtgatcggcattctcaaaagctcgcagtttgatatcacgccacctccccgtaccaagctcctcaactgcctgtaccaatgcttctacttctaaaactgaaaacggcctcctagttcg

SEQ ID NO: 16202 - DNA, 541 bp, Gossypium hirsutum
  Clone ID: LIB3829-015-Q1-N6-H3
aactaaagatatatgatataattaataaatatagtttaaaatattcttacaataatgttaaacatgacaaagttaaaaacattcttacaataagaaaactaatgtctaagatggcggcttttgcgattgctgaaacatctgcatcatctgctgaaactgtagctggaggtcaaagtactttttgctctgctctgctgccatcgctgctgcctctgcctctctcgctcgtgcctctgcctccctcgctgctgccgctgcctctctcgctactgtcgctgcctccttttttgctgcctccgctctaagttgttgctagagttcttcatattttcattgaacctcagcaatttgctcaaccgtgtccgcttgcatctgagttatctagtctcttaacctctgaacttcagcttgagcttgactttcggaaagcatgtattgctgggagccggatccaaaatattgggtcggggtaacactagatccttgaaatctaacccgatcgtacctttcaagacccaaaacttcagtgataattttgtta

SEQ ID NO: 16203 - DNA, 548 bp, Gossypium hirsutum
  Clone ID: LIB3829-015-Q1-N6-H4
aaaaataaaaaactcaatacatgtcacttcaactagatagtatagcacagctagaatgttaaacaaggctctaactcatacaagactgcataatatctcaatcctattaactacttagaatgcacttgtttagccctcacaccaccgacttccgcaactcggctgcaccgtgtgcaaagtgacatctttctccaaaagtgcaacttccctttgcaaaattgtcgcacaactttgttttgtagttgcttcccggatgcccttgaccaccatgtgcaccagctgttttggctggacctggtactggacccaggctgctgattagttctctaaccattgcactggcttctttaatttgctcaaatgatccttcgagctcgatgttcctaagtgatggatctgactcatgttcccgaatagatagcttcgcacctgtttgacgacatatctgcttggagtgcacaccacctttcccaataatggctcctgcaagggaagcatccacactaatttttcgcagttgctgaagcaccaaacgttgcagcaggacc

SEQ ID NO: 16204 - DNA, 562 bp, Gossypium hirsutum
  Clone ID: LIB3829-015-Q1-N6-H5
gagaaaatatactccattcaattcaaacctaagccggtaattaaataaaccaaaccaaattagaatagaagagggcaaggcctcaatatccaaccatattaagaaaataaaccaaaaaaccttccgacatttgaaacaaaatcttaactcaagacaagcatatctagtaacgaccaatcccccaaactctgattacaccatcagtgtacccactaaacaaggtgcttccatcggcactccagttcaagctagtgcagtatatgaccttcttcttatttccgatgtcagtgacgtcagacttctcagcctcagccttaagatcaaccttcaagtcctccactatgctcttactctccagatcccagatcttgataccctgctcggtggctgcgcaaagccagtacctattaggactaaagcaaagcgagtgaatgacggaacctgcatcaagactataaagcttctttccttcagccaaatcccacaacagaatcactccatcttttcctccactggcacacaaagacccatcaggtgaaaccgccaccgtattcacataacc

SEQ ID NO: 16205 - DNA, 126 bp, Gossypium hirsutum
  Clone ID: LIB3829-015-Q1-N6-H6
aagctcacaagaagcaataggttgtataccataaacaaataggtcaagttccaacgctaaatctttccatacactttaccagttaccaaagcagatagcactctaaaaaaaatggtctaagcaaac

SEQ ID NO: 16206 - DNA, 527 bp, Gossypium hirsutum
  Clone ID: LIB3829-015-Q1-N6-H7
tttttttttttttttttttttttttttttttttttttttttttttttttttttttttttttttttttttttttttttttttttttttttttttttttttttttttttttttttttttttttttttttttttttttttttttttttttttttttttttaaaaaaaagggggaaaaaaagcacgctttttttaaatttaaattctaatttttaaaccccgaggggggaacataaaaaaaaaccaggtggcgcgggggaaaaaaaaaaaaaaactttctggggaaagggggggccccccacagggtggggggaataaagcccccccgtttataccaaaaaagaggggtggttacacaaaaggggggggggggaaaaggtcggggtttttctccccccctagagggaaaaaaaagcccaaaaggcccgggggggggtctccccccgaaaaagaaaacaagaaccttggtttgctcccccccgggggggggggggaaaagcccctcaaaaaaacccaggggggaaggggcgc

SEQ ID NO: 16207 - DNA, 493 bp, Gossypium hirsutum
  Clone ID: LIB3829-015-Q1-N6-H8
aaaaaaacgcagccattggtgagggccccagttcatgttttaccaaaaaacaaacagggggcaagaacattcccggcgcttaaaattattactactgaacacctgcttatagaaaatgcttatatgtttcgtccataataagcaaataaatacaaaacaagctcacaagtggttcctggaccaaaaaggcacgactcaggagcccaaggaatattactctctcacgttcaattgattcataaccgagttttgattttgatggcacatacagaccatgcttaacatgaaaagtaaagaggactgcagcaccatttacgaagcgcaaaaagatccaacgggataaacaagaagttcctttcattgccaaccacctaattagctgggacaggctggggggtcaccccaatttttttccaagaaaggcggggcataatctgttttggggcgatgcgatccttgaactcgatagcaaagttgagcaatgagtcgaaaa

SEQ ID NO: 16208 - DNA, 537 bp, Gossypium hirsutum
  Clone ID: LIB3829-015-Q1-N6-H9
aaaaaggaaaattgcactcaactttcattttttcaggtttatgcaaatttgagacaaacagattgtgttttttctcaaacaaattataatggaacatgaacttattgattcaaaaaacttctggtagaggcttcccttcaaggaatgatttaaataacatgagtgatctttcaggctgtgagaaaggagcttcatgagaagcacctctgattgtagcaaatgacaggatattaccataaacttgagtccatccaccaacctgtttcccttcaaaccaaactctgtaaggcacagttgtttcaagttctaactcctttgccagtcggcttaccagggagcggcttcccgtcaatggtataacagaatcttgatctccgctgtaaaccaagactggtatcccggatttgattagtgaaccaacaatggagattgtaggcatctcgaggttcagcagctgataatccagtatgttgctgcacacggtccatcggcggactccaacaagccgagcatgaagagctttttggacatcctttc

SEQ ID NO: 16209 - DNA, 618 bp, Gossypium hirsutum
  unsure (1)..(618): unsure at all n locations; Clone ID: LIB3829-016-Q1-K6-A1
cggccgcgtgggctaaaatctaagcagtaggagcttaactgggatttcaggtgcgaggcaaggtgttagcaagttgcgagagatcaagggaaccataacgtacatattcactaggaaagtgattagtactacatgcgtagggcgctcaggatagatttgtctatgttgcaggagggtgaaagtggagtagagtttattccttttttattcaattgacctaatatttgcttcacaagaaaggatacaaggttggtgcttcttaggtgataacttcgagtaccagagaagaaacttaattccgagtgcttttcattgttgatatggttatatagagtgacactcgtaggaaggttgtaaaatggcttttgtttcagaggaagaaaaaactgaggattaccttttcaagatcgtactagttggtgattcagctgttgggaaatcgaatttacttgcaagatttgctaggaatgaattctacccaaattcaaagtcaaccataggagtagagtttcaaactcagaagttggatataaatgggaaggaagttaaggcacagatctgggatacggctggtcaggagcgcttcagggccgttacatctgcantattaccgagtgc

SEQ ID NO: 16210 - DNA, 588 bp, Gossypium hirsutum
  unsure (1)..(588): unsure at all n locations; Clone ID: LIB3829-016-Q1-K6-A10
gntaacttccgttggcctgaagagtttgagcgccaatcatctagagaagttcctcggcaccatgctcattcaggatttcatcagaagggttgcctgtgattctcccatacattaccaaacaaatactgtatgcttccccagcagatttcaagcatcttttgcaatataaatcaatcaaatttgctgactttgttgatgctgatttcggtcagaaggcagcagacctgatgttaggctgctgtgtgattgttttgagagaagaccatatccaagcagatgcattggcaatagccattggctgctggaaaggccggtcgagtttgagtgtgatggttacagcaatggactgccaggaactgctggaaaggctttcagcacgcatggagactgaaaagaatggaactttggcacccgaaagccttggcgtgctagataagaaacaagatatgagtggtgaaaatggaaccccactggaggatcacaatgttgaagcaatgaaaatacaggataccaatgctagtgaataggactaaagatgaaagagtttcaaggttctatagatactttagtaatttgaaggtcttactg

SEQ ID NO: 16211 - DNA, 608 bp, Gossypium hirsutum
  unsure (1)..(608): unsure at all n locations; Clone ID: LIB3829-016-Q1-K6-A11
gtttaagacccacaaaccagggtacccacccctgtaaaatctaccttttccggggtgccagcacactcgnagtacncgtatacccgcatatttgggtgcaacgcgctaacagacacaccggtatctgacctgtaacaagggctcgggtaatatgcacgccatcgccgtgcaaccgaaaagcatatggagagtttccttatcgacttcgatttgatcaaccttgatggcggattcggcggagacgaaatccatgcgacgttcacgctcttcttcttggagcttcaaagagatgccacgaacgggacccttctggatccgcttcatgagatgggtggaaaagccggcgatcttgatgcggagacgcttggaagggatgatagccacttcttcgatgatcttcttgtcggtgtggaaatcaagcgtcatgcgagagtagtacctctcgatcacatggcgagaggatttctttaccgtcttggtacggactcggcccatggttcggagaggcggcggagaagtggctggctaggggttacagcagacttgaaaatgagaaactgatatggttcttagaacttggaatgtgaattatgggttttatatatatg

SEQ ID NO: 16212 - DNA, 591 bp, Gossypium hirsutum
  unsure (1)..(591): unsure at all n locations; Clone ID: LIB3829-016-Q1-K6-A12
cagcaagtgctctgacaaanaatctgatgatgggtgtgcagatggtgaaggggctacgnngaaagggaaaaggaaggttttaattctggagtccagcagcgtaaaaggatgcttcgtccaagaggcagccctcaagtggcaagccgtgagccttcttttagaccccgacctcaagacaacgaaggatctcagggtaaacctgaagtgtctactgttgtttataaagttggtgaatgcatgcaagagctgattaagttgtgggaagaatatgaagcttctcaagctgataaaaatggtgaaagctctcaaaatggccctactcttgaaattcaaatccctgctgagcatgttactgccacaaatcgtcaggtcaggggtggccagctatgggggactgatatatacacagatgactctgaccttgttgctgttcttatgcatactggttactgccgtccaactgcttctccacctccaccagctatccaagagctacgtgctactatccgtgtgctgccaccacaagattgctacacctctaaacttaggaacaatgttcgttcccgtgcttggggagctggaatcagttgt

SEQ ID NO: 16213 - DNA, 620 bp, Gossypium hirsutum
  Clone ID: LIB3829-016-Q1-K6-A2
ggcaacgtagatcacccccttccagccgtaggtcagtaactccttcccgtggtaagtctccgtcaccttatcaatcaagttctatgtctcctgtgcaacgtagatcttcttcaccagttaggaggtctccaaagggacaaagatcatcttcgctttctccaggaggacagcgaatgcgtcggaagttgtctcctgtgggacataaccactctagtatgaggtccacacgctcagatcgtatggatcagagtgatacagatgataaagtgcctggtttatcaccacccccaaataagtctcctctctccaaatccccatcacatgtgaggaatcgatctggaagtgaagataggaggtcgtcaagtccatatggaagtcccccgaggcagaggaaggcccgaattgctcgtgatgatagctttagtcctgaatggaaatcaagagaactgaaaggtcatcgggacggtcaaggaacggggagaagaaatgaaaccagtgaaagcaggcattcaccgcctatcagtaggcaaagggtttctcctaggaaggttcatactcctgaacgattggcaggcagtcggtctacagactctcggagtcggcttgataatgttgaatca

SEQ ID NO: 16214 - DNA, 618 bp, Gossypium hirsutum
  Clone ID: LIB3829-016-Q1-K6-A3
ctatttcttctttgaatcacgcagtaacaaagagaccctgttgtaatctggttgctggagtccaggttgcagtagtgaactggctttatttatgaaaatggccctttctccatttctgataacatgtctcttgtctggaatgagtttggttgggacaaggtgtcaaaccttctatatgtagaccagcctgttggtactggctttagttatagctctgaccgaagggacattcgtcataatgaagacgaagttagcaatgacctttatgactttttacaggcattctttgctgaacaccctgagtttgccaagaatgacttttatataactggagaatcgtatgctgggcactacattccagcttttgctgcccgactccaccgaggaaacaaagctaaagatggaattcatataaacctgaagggatttgctattggaaatggcctgactgaccctgcaatccagtataaagcttaccccgattatgctttagacatggggttaattaagaagtctgactatagtttaatcaacaagctggttccagtttgtgaatttgcaataaagctttgtggcactgatggtacagtctcttgcatggcttcctattttgtctgc

SEQ ID NO: 16215 - DNA, 618 bp, Gossypium hirsutum
  Clone ID: LIB3829-016-Q1-K6-A4
aggaagtgtgtgtgatattcgtggggttagaaatgttgcagaccagggctatttatcccttacatgcagaactttgctcaagattttcagcagtttgaagattactacaaaacccagaaacccaatgcttcaatgaacgacctcgctgaaacctccacgatttctgaatataacctggaaggagaaggtgatctgttcagagctttagagcccatcattgaggaaccgattgtgggccttgattccatgaccgcagccatctcattaatctcgtgcggtgaagatgtcattacttcacaagaacttaaggatgcagatatcgaatcatttcaaaacgagcagcttctcgaggttctatatgagtgtgagaaggatctcatggcacgaggagcgataggaacagcaccggctgcagtccttgatattgatactcccgttgtgaagacgaatgaaagccaaaatcgtgatgcatcattcgaggaatgcgtgagctcggattgtttaagttcaatggaatgcatgcaagaagctgcagtcgagcctaattttctggatttcactggaatggattttgattctgtttacggaatgaggagagcatttagtgaaggcgatata

SEQ ID NO: 16216 - DNA, 616 bp, Gossypium hirsutum
  Clone ID: LIB3829-016-Q1-K6-A5
gccggaagctgcagtagtgttgtcgcacaatacggtcacagaaccaaaaatatcgtgcaaacaagaagtgaagttgaccttttggatgatggctatagatggcgcaaatatggacagaaagtggtgaaagggaaccctcatccaaggagctattacaaatgcacgagtgctggatgcaatgttaggaagcatgtggaaagatcatcaactgacccaaaagcagttataacaacatacgagggaaagcataaccacgacgttccagcagctagaaacagcagccacaacatggtgaacaacagtttgtcgcagacaaaaccgcacaaggttgtagctgagaaccagaaccattctttacttaaagcaatggattttggaaacaatggtcagggaccagcagttttaaggctaaaggaggagcagataagagtgtaatcccccacctcttaaagcagccagagtctggccattcattggtatgaaaatgcacaagggttgaataaataacgcaggtgaaattgaaggataaatcctggtgaagcataatataattacccagttttgaacgttttggaatttataagtaatgttgtaaagcatgttagggcttgtttgc

SEQ ID NO: 16217 - DNA, 602 bp, Gossypium hirsutum
  unsure (1)..(602): unsure at all n locations; Clone ID: LIB3829-016-Q1-K6-A6
nagnaaatcaaaaccacaagggtgaagnaaggtaaaaaccagcagcggcaaaggcaataaaaggtgaagccaaagagagagagatatatacataataaaaaagatcttcaaaagaacacagctatggctcctcatggagaaggatcagatgcttcagtggaagccatggttgctcaagtcgaaaaacacccaatttcatcaatccttatcatcattgctatgcaaacagaagctttgccggtggtgaataagttccagttgattgaaaaccctcattcttcgtttccaaaaggggtcccttggatccattatcatggtgcatacaaggacatcataatcaatctagtgtggcccggaaaagatttaacctttggggttgatagtgttggcacaatttctgcctctcttgtgacctatgcatctatccaagcattgcagccagacctaatcataaatgcaggcactgccggcggctttaaggaaaagggagctgcgatcggtgatgtttttctcgtatctcatgttgcattccatgatagaagaataccaatccctgtttttgatctatacggtgttggtttgcggcagacctactcaacacc

SEQ ID NO: 16218 - DNA, 567 bp, Gossypium hirsutum
  Clone ID: LIB3829-016-Q1-K6-A7
aagtggtgccgatatgctgcttgaagaacggactactgggcttgtctattgttcttcagtggatagctctgttttttcccctccgtccgaggaaagaaggctagtttgaatctaaaggcgactgagcttaggctcggacttcctggattgcagtcgcctgaaagaaatccagagctttgcttgttaagttcttctcagcttgatgagaagccgtttttccctttgcatccttcaagtgatggtcactgctttgcatcacagaagagtgttgtttcagggaataaaagagggttctctgatgcaatggatgggttctcagagggcaagtttctttctgattcaaaagttgatgttatgctgtcacctaggccttcttcaaacttcggggctcaaccaatgaaagctaaagaaatcacgagccaaaacgtggtgcatgacaggcctcatgctgctgacaagaccaggcctaatcccaatgcatctgcaaacaataacagtggagcacctgctaacaaggcacaggttgtaggttggccacctatcagatcatttaggaagaactcattg

SEQ ID NO: 16219 - DNA, 600 bp, Gossypium hirsutum
  Clone ID: LIB3829-016-Q1-K6-A9
cggtcgcgtgggcggacgcgtgggcggacgcgtggggtttccatgaaggagttgggagattgattagtcgagctgtatctcagcggcaaacatgccgatcggtcgccccttccgagttaatttctcgtcgcctcatgttctcttcctcaagaacgccgtccttgctggctgtcggaaacccaagctccgtcctttcctccaattctgagtctttagcatctttgccatctctcaagtggaaccattttataggccaaaggagaagcatgtttattcaaactcaatcaacacccaatccttcgtctttgatgttttatccagggaaagcggtgatggaagtcgggagtgctgatttcccaaatgcccgttctgcaatgacttcaccattggccaaggccttgtatggaattgacggtatcactcgagttttctttggatctgattttatcactgtaacaaagtctgatgatgcttcttgggatctcctcaagccagaaatttttgctgctattatggacttttattcctctggacaaccattatttctagactcaaaaactgcatcatccatggacactgctatccatgaggatgactctg

SEQ ID NO: 16220 - DNA, 413 bp, Gossypium hirsutum
  unsure (1)..(413): unsure at all n locations; Clone ID: LIB3829-016-Q1-K6-B1
ctcccgaacatgagtgattagccaggnaaaaacgaaagcctacctagtgttcctgaaagctaactagaaattccgttcctagaaccccacaacccactgccatgcgcagatctgcaaggcttctcaaccaaaacactccctttaagtcaaaggtcaattccaaggacagtactgctagctctacagttaaactttccaagaaacccatacactcaaatcatggttccacaaatcatataaggtcaacgcctcagttgcgaaggtctcaaagaaccagcactgtttcaagtgagatatcaagaaattgtgcaaactcaacgcctgngttgcgaaaatctccaagattgagcagtgggtctttgtctaacaagcccgagggtagcaaatttgtcgagacaaagaatgatggatct

SEQ ID NO: 16221 - DNA, 367 bp, Gossypium hirsutum
  Clone ID: LIB3829-016-Q1-K6-B11
atgaacctatttagtggcatctgcatcatccgatgggtttatacgtgtttgggatgttcggatggctgccaaggagaagccaaatccattggccgaggctaatacgaagtccaggctgacttgtcttgctggatcatctctcaaatcttctaaacgacctcggattgggaagagtactcctaaagaagaggatgtggcagaagaagtataagaaaatttgccagtgagcttgaactatgtagaaggggttttgagagctctctcatggttgctgaaaaaaatcctgtttttttattcacaactgataattcagttcatattgagtttgactgttgagttgtatcattttatttaaaatttattactt

SEQ ID NO: 16222 - DNA, 298 bp, Gossypium hirsutum
  unsure (1)..(298): unsure at all n locations; Clone ID: LIB3829-016-Q1-K6-B12
cacggttggtgttgcttcaatagaacttccagantccgcagtggctttttggtcaggttgctgcttgaaggcttaagatggtattgtttttctcagcagcttttgtcatcggccatagagcatagtgattaagttatttgttccatgtatttgctttctcatattgttctccccgaatagtttatttgtttgataaaagtcagtgaaactcttgttcgattggtccgtatatcattttgtgggattgtgaaagtactgtttttaaataatgaataaaatttgaaatgtttgcttattc

SEQ ID NO: 16223 - DNA, 448 bp, Gossypium hirsutum
  Clone ID: LIB3829-016-Q1-K6-B2
ggcacagctagccaccaactgcctcttcttatcatttccaacgtccctctctgtgcagtcgaatagcctctcttttagttttcatttctgctattcaattcttcctgcacaaaatcctctctaatctgggcatattctccatcgtccttccgggttcaaataggaaaggtctgggttcgctctcaactgtcctatgtaggctttgactgtgcaaggcaatggaacatttgagtgtaatacagtttttgatgccaaaagttcccccaaatagtcccaagccaccaaacttgaagccggtttaaagttttttttatcgaaggctgcgccaaacttggtctccgccctagtattaatttctcgactactatgatttttgtttatggtcaaggtacttgatctctctattatacctataagttcagccatatagctttgtattctttgtgat

SEQ ID NO: 16224 - DNA, 592 bp, Gossypium hirsutum
  Clone ID: LIB3829-016-Q1-K6-B3
attttcttttacctgattttggtttttaatcctttttttctctctctctatctgtttctcctcggtttctacgctgtctcaaccaccacctttgctttccctttctcaggccacaggcacaaggatagatgcaaaggacgatcaattaagccatcgttcactgagtaaaaggttgccaacatggtgagcttacgcagacgcaagcttttgggactctgctctgggaagaattctgttttgactccacttcatagattttttggtaatggaaatgcccttgaaacttcaagccagaatgcaaaatcagttagtgtgcatcctattcccttagattccatcaaccatgtgcatgggaaaagcattcctatggttagctgtggatccccaaatgtttctggctctggatcatcaaaagagcatcataatcaaccttttccagggcaactgatcaaacggagaaagcggcaccgaaggaagcatgttcaaaaccaagaaccttgtctgatgaggggtgtatacttcaaaaatatgaaatggcaagctgcaataaaagtcgacaagaaacagattcacttaggcactgttggttcac

SEQ ID NO: 16225 - DNA, 592 bp, Gossypium hirsutum
  Clone ID: LIB3829-016-Q1-K6-B4
gctttttctttgatttctgtttctccttcattcttttatccaaacattatcttccaagcaccaacatcaccaccgtgaacggcggttgttcccgccatggtacgaagcgttcaccaccactttcatgacctcatggttccaaaaggtacccttcaaatcttcacctccaccatgccattaaagaagctcaaacccaaagcaaaaaacctcgtatggtcgtcatcaacggagaaccaaaaagaagatcacaacaaaacgacgccgtctccgtcgttgctggacttgcccgagctcgtactggactgcattttcgaccgtcttcaaccggcggagctttgtgccatgtctggtgtttgttcttctttgagagaacggtgtgtgagtgactatatttgggcgaaaaggatgaaagggaaatgggggaaagtgattggagatgctgcttatagagaatggcaatggtatattgctttgcaaaatagatccaatctgttgaataatcaaaggaatcaaagcaatttgtcgtttgaatctgttgctaaaatttggccattcctttcttggtttaacattaaacccagagctcaaaaag

SEQ ID NO: 16226 - DNA, 616 bp, Gossypium hirsutum
  unsure (1)..(616): unsure at all n locations; Clone ID: LIB3829-016-Q1-K6-B5
atatcctctaattctaaagctaanagttttaagttaacgaagcatttgggtcgtttcgaagtaatgggaaactttcaggaaaagtaaagaagggagccggaggaaggaaaggtggtggcccgaagaagaagcccgtttcaaggtctgtcaaagctggtctccagttccctgttggtaggatcggccgttatttgaagaaaggaaggtattcgcagcgggtcggaaccggagccccggtttacttggctgctgttcttgagtacttggccgctgaggttctggaattggctgggaacgctgcacgtgacaacaagaaaaacaggatcatcccaaggcacgttctactcgccgtgaggaacgacgaagaattagggaagcttctcgccggcgtaaccatcgctcacggtggtgtgttgccgaacatcaacccagttcttttgccgaagaagactgaaaaggccgccggcaaagaacccaaatctccatcaaaggccaccaagtctcctaagaaagcttaatttgttttaacaaaactagattcacagggctttatttttcttagttgtatgtccttttgggtgattgttttcacagtgtaggggaagactgccttaaa

SEQ ID NO: 16227 - DNA, 600 bp, Gossypium hirsutum
  unsure (1)..(600): unsure at all n locations; Clone ID: LIB3829-016-Q1-K6-B6
gtcagatttactcacttttttgtgcactctgccatttctatctccccaaattacccataatgcacagcagaatatcttacattgtgatgctgagttcttcgcaaatacccagggcattcancggaaaagatggtccatgttctctgatccaactccacagcgtggacatactattatgtttgttagctttttttgaagcatattaactcgtatagctaggaaattccatgatatcttccaaattgtaattttgatttttgaaggaaggttcaggagccataattttttgtaaaattccttatagccatcttgtaaagcgtaagctctaggatcatcttcaatactctgtaatagtttataggcacttcgcactgtgaattcgcccgacgcctctgcactccagacccgaaaatcatcatgaggttcttctgccaatgggatgccaataatcttctcagctacatcctccggaaaggtattatttgagtgcaatctgttatcccgtgccccattcttccacatccaaaacaaaatgtcggtagattatcgtacttaaaaggaacccacgttttattaacattaatactagagacaaaaata

SEQ ID NO: 16228 - DNA, 605 bp, Gossypium hirsutum
  Clone ID: LIB3829-016-Q1-K6-B7
ggtatttccaaggaagacaagaagtgaacttcctaattttccatcattcatcccattcctgcctccattgacctcagcaaatctcaaggtttattatgtgacttgttattctcttattgctggaattattatttttggtggacttctagcacccactctggagcttaagctaggactggggggcacatcatatgcagatttcatccgtagtgtacatctgccaatgcagttgagtcaggttgatcctatagtggcatccttctctggaggagcagtaggggttatctcagccttgatggtagttgaaataaacaatgttaaacagcaagagcataaacgatgcaagtattgtcttggaacaggatatcttgcttgtgctcgctgctcaagtaccggatcacttgttcttactgaaccagtctcgacactaaatggtggagaccgtcctttatcaacccccagaacggaaagatgttcaaactgtttgggatccggaaaggtgatgtgccctacgtgtctttgcaccggaatggcaatggcaagcgaacacgacccacgaattgatccatttgattagaggtgacattctcattctctttattatt

SEQ ID NO: 16229 - DNA, 86 bp, Gossypium hirsutum
  Clone ID: LIB3829-016-Q1-K6-B9
cccagcgtccgggggttgtggttccagagaaagcaaaaccagggttaggtatgatgagtagtggtggtgggcagtggtgagaattg

SEQ ID NO: 16230 - DNA, 578 bp, Gossypium hirsutum
  unsure (1)..(578): unsure at all n locations; Clone ID: LIB3829-016-Q1-K6-C1
cggacgcgtggggngaaccccatagcattgaggaggttgaggactgcttgtgagagagcaaagaggactctttcatcgactgctcaaactaccatcgagatcgattcattgtacgagggtattgacttttacaccacgataactcgtgcaaggtttgaggagcttaacatggatctttttaggaagtgtatggagccagttgagaagtgtttgagggatgctaagatggataagagcagtgtccatgatgttgttcttgttggtggttccactcgtattcctaaagtgcagcagttgttgcaagacttcttcaacgggaaggagctctgcaagagcattaatcctgatgaggccgttgcttatggtgctgcggttcaggctgctatcttgagtggtgaaggaaatgagaaggttcaggatctattgcttttggatgtcactcctttgtcccttggactcgaaactgctggtggtgttatgactgttttgattccgagaaacactaccattcccaccaagaaggagcaggtgttttcaacttactctgataaccaacccggtgtcttgatccaagttta

SEQ ID NO: 16231 - DNA, 591 bp, Gossypium hirsutum
  Clone ID: LIB3829-016-Q1-K6-C10
tttgagccttggtgcttcttcctatatgaaccatgagtctggcatctttacagaatttgcacacaaaagaaacaacaaatcatacgaagtacattcattcaatccattgattgaaaatgaaatagaatgggaaaacaaaggaatttacataccagaatgagtgaagagaatggaggctaaaatgcataagactgcatagagaaagcttaaacagtggggccttgactccatggctagggttgtaacagagatgagcaagggttgggggatgatccaggctgaataaatatataagaagaggggcaaagcacatctggtggacagggagaaggaaaaaggagtgaaacaaggtgggggcagaaaggggaaccgtcaacatagggaaactaaagaagatccaaaggcaatcaatgctgtaatcagattctaataatttctttcagcttcgtagaatatatgcttgcttgggcatggggaaaattggagggttttcaacttttgattttgcttgctttctactcagacaaagaatactacttatttgatattcattaagcatccgatgaaaataagggtgcgtttggttcgctg

SEQ ID NO: 16232 - DNA, 586 bp, Gossypium hirsutum
  unsure (1)..(586): unsure at all n locations; Clone ID: LIB3829-016-Q1-K6-C11
gttattgcagcgacccccggggttacttttggtttacgactatgttcctaatgggaccctagccgaccaccttcacggccgtccaaaaccctcacttacttggccagtgaggctcgaaatcgctttgcaaacggctctagctattgagtacttgcatttctctgtggtgccacccattgttcatcgagatgttacgacatcaaatattnttcgtcngaaaaagatatgaggattaaagttggtgattttgggctatccaggcttttggctttccctgaaaactcgtctttgaaatcggaatttgtttggaccgggcctcagggaacacccgggtatttggatccggattaccaccggtcgttccggctaacagagaaaagcgacgtttacagcttcggcgtcgtgttactagagttgatttccgggctgaaagcggtggatcagaggagggagaaaagggaaatggcgctggcagatttggtggtttcgaagatccagatgggtttgttgcaccaggtggtagacccggctttgatcctcgatgggcagccgatggacggcgtggaggcagtggcggaactggcgt

SEQ ID NO: 16233 - DNA, 622 bp, Gossypium hirsutum
  unsure (1)..(622): unsure at all n locations; Clone ID: LIB3829-016-Q1-K6-C12
cccggngtcgacccacgccgtccgnaagnaaaaaggttctgctagagaactttgggatgatgtagtggccggtcctcaaccggaacgtggccttggccggctgaggaagatcaccaccaccccacccttgtccaccaaagatgaggcttcatcaatggcgatgccgacgagtccgacgacacctgggacaccatcgacgccggtgtcggctcgtagggacaacgtgtggaggagcgtgttcaatccaggtagcaaccttgcaaccaaaggtattggcgctgaagttttcgacaagcctcaacctaactctcctactgtttatgactggctttacagcggggagacccggagcaagcatcaccgttgattaggcggtggctgacggcggcggatggtagcaaaaccactagcagaaggttgcagctactgaaggagcaggatttgcatgtaaatatatatatcgtcctttttaaaagttcttcaatgggtcaattaagtagtagtagtaagtaagatgtttaaaagagtaagcggcagcgcagggtggtcgatgaccttatgtcattcaagatcccggccgtgagcggcggcagctgctgctatattaaataattattaaatc

SEQ ID NO: 16234 - DNA, 625 bp, Gossypium hirsutum
  Clone ID: LIB3829-016-Q1-K6-C2
caaatcagcagaacttttggattagaagcttttcaaaatagcactttcaaatgcataataagaaagaagcgtgcagaaactttcagcgcggcagctgtcagtatggtgaaaggtgcaaatttcttcatgtgattcagcaacagccaaagtctaatgcatttggatttggcacacaagctatctcacaccaacaacaaaagccgaacccattcggttttggtgtccagaacaatgctcagtcaaaaggggtcaatgattttggaaataaacagagccagttcaagaatacatggacccgatcttctgcaagcagtggtgccccttcattgcggcagcctgacaatcagcctcaggcaacaaaccatagatgcaatgatcctgagtcctgcaaacgtattattgctgaagattttgagcacgagagacccttgtggaagcttacatgctacagccattggaaaaattccccttgcgatattgtcggtgatgtcagctatgaagaattgcgggcagcagcttatgatgatgcaaaacgtgggttaagcttgcaatctattattgagcgagagaggaatttactgaattcaaagttagttgagtttgaaaactttcttcgtaatcccta

SEQ ID NO: 16235 - DNA, 614 bp, Gossypium hirsutum
  unsure (1)..(614): unsure at all n locations; Clone ID: LIB3829-016-Q1-K6-C3
cccggngtcgacccacgccgtccgagnactctcatttcgtttctccacaactcaaacctctcaaatctttttcagttttcatttccccatccaaacgacgccctaaaccaaagtcatggccaccccttccgcacgtgacgaaaacgtttacctggcgaaactcgccgagcaagccgagcgctacgaggagatggtcaagttcatggagaacgtcgtctccgccgtccctgcccccgacgaactcaccgtcgaggaacggaacctcctctctgtcgcctacaagaacgtgatcggcgctcgccgtgcctcttggcggatcgtttcctccatcgagcagaaagaggaaggacgtggcaacgccgaccacgtctctgtcatccgtgagtacagggccaagatcgaggccgaattgtccgagatttgcgccggaattttgaagcttctcgacgagaagctcgttccggccgccgggaccggtgattccaaggtcttttacctgaagatgaagggagattaccataggtacttggctgagttcaagactggcgatgacaggaaagcggctgccgagaatacgctcactgcgtataaatctgctcaggacattgcgaatg

SEQ ID NO: 16236 - DNA, 603 bp, Gossypium hirsutum
  unsure (1)..(603): unsure at all n locations; Clone ID: LIB3829-016-Q1-K6-C4
gagntgtgggaaagagaaaagatagaaagtatcatctgggaaagaaggaatctgctggaaaagctaaaacgaagaaagtgtcgattcccaaaaagtctacttcccagaaaagaaccccaaaaacatcagcatctaaaagttcaaaggcagatgatgatagtgacaaaagtccaaaggtgtcttcgaggaagaaaccagagaaggtcactaaggaaaagtcctctacaccgagtacatctgcgtccaaggagaaaaccagcaagagggctggaaaggggaaggacaaagctaaagagcaaaaactgaagccaagtgatcatgaactaagggatacaatttgtaaaattcttaaggaagtggacttcaatacggctacattcactgacattctgaagcttcttgcgcaacatttcaatactgacctcaccccgaggaagtcatcaatcaagctcatgatccaggaagaacttaccaaactagctgatgaagcctatgacgaagacgacgaaggagatgccgagaaagacgaaacccaatctgctggtcaagaggttcaagcctgaccctacaagatggacaataactacatgcaaaaatgacaaa

SEQ ID NO: 16237 - DNA, 586 bp, Gossypium hirsutum
  Clone ID: LIB3829-016-Q1-K6-C5
attaagttgctgtcttctaggtggtgtcaacgtcaaagtacacaaagatctgctgaaaaatgaatgcccccacattgttgttgggacacctggaaggatattggctctggctagagacaaggacctttcattgaagaatgtcaggcatttcattcttgatgaatgtgacaagatgctggaatcactcgacatgaggagagatgtgcaggaaattttcaagatgaccccccatgataagcaagttatgatgttttctgctacgctcagcaaagaaattcgccccgtttgcaagaaatttatgcaagatccaatggaaatttatgtggacgacgaggccaagttgacccttcacggtcttgtgcagcactacatcaaattgagtgagctggagaaaaaccgcaagttgaatgacctccttgatgcattggacttcaaccaagttgttatctttgtcaaaagtgtgaaccgagctgctgagttaaacaagttacttgtagagtgtaattttccttctatatgcatccactctggcatgtcccaggaggaaaggctgactcggtacaagggtttcaaggaggggcataaa

SEQ ID NO: 16238 - DNA, 585 bp, Gossypium hirsutum
  unsure (1)..(585): unsure at all n locations; Clone ID: LIB3829-016-Q1-K6-C6
ccaccaccaccaccactgcgtgnaacccccatctgagcccanaacctttgaagaaggatttcaatattccctaccctttaattctcacggcggacgaaatgagcgcctcgagattcataaagtgcgtcaccgtcggcgatggagccgtcggaaagacctgcttgctgatttcctacaccagcaacactttccctacggactatgtcccgactgttttcgacaatttcagtgcaaatgtcgtcgtcgatggcagcactgtcaacttaggtttatgggacactgctggtcaggaggattacaatagactacgaccactgagctatcgtggggctgatgtgtttattcttgcattttctctcatcagcaaggccagttatgaaaacgttgccaagaagtggattcctgaactaaagcattatgcccctggtgttccgatagttcttgttggaactaagcttgatctccgagatgatcaacaattcttaacagaccatcctaacgcagtgcccatttctacagctcagggagaggaattaaagaaacagattgcggctcctgcatacattgagtgtagctcaaaaacac

SEQ ID NO: 16239 - DNA, 276 bp, Gossypium hirsutum
  unsure (1)..(276): unsure at all n locations; Clone ID: LIB3829-016-Q1-K6-C7
gtatcaacaggttgtttcgctggtggtactgtgctccgtgtggccaagnacttggccgagnaacaacaagggcgctcgcgtgcttgttgtttgctcggaaacaccgcggttactttccgtgggccgagtgatactcacttggatagtttagttggccaagcgttgttcggtgatggtgctgctgctgttatagtaggtgcggatccattgtctgaaatcgagaagcctatgtttgaactcgtctcggcggcccaaacgatcttgccagacagcgat

SEQ ID NO: 16240 - DNA, 600 bp, Gossypium hirsutum
  unsure (1)..(600): unsure at all n locations; Clone ID: LIB3829-016-Q1-K6-C8
gggtgacattgctcctacttcgagnacttatcgaagtgtttcgatggatagttttatggggaagttgaactttggtgacgaatcaccaaaactacctccttcacccggatctcgtcctggacaactctcaccaagcaattcaattgatgggaattctgctgcctttagtttggagctcggaaacggtgagttcagtgaagctgaactgaagaaaattatggcaaacgagaagctcgcagaaatcgcaatgactgatccaaagcgtgcaaagaggattttggctaatcgtcaatcagctgctcgttccaaagaaaggaagatgcggtacatttccgagttggagcacaaggttcagaccctgcaaactgaagctaccacattatcggctcaattaacacttctacagagagattccgttgggcttagcaatcagaacaacgagttgaagtttcgtattcaatccatggaacaacaggcacaactccgtgacgctctaaacgaaacattaaccgcggaagtccgtcgattaaagcttgctactcaagaactaggtggcgattctgatccatccaaaggcatggtctcgcagcagcttcccat

SEQ ID NO: 16241 - DNA, 412 bp, Gossypium hirsutum
  unsure (1)..(412): unsure at all n locations; Clone ID: LIB3829-016-Q1-K6-C9
gacactggaacaacaggtatcgaccacctggnaanaaanagtccaatgtccatcggcaagcatagaactactgttggagcttcggatgtagtggagaagttggcaaatgtgaccattgtaaatcgcaggcaaaggccagccgcaatgaaagctggggtacagtggactgcgcaatctaagaatgacatgtttattagaccaacccaacagatgcagtctggaagaagttttnaccagaaaagtagtggggtgagatgggtggtggcccagcatcttggtttattgttatgtatgtgtaatcggagtccaaataattttcttttatggaaatgaacgctgtttgagtgctttcgtggtaatataatacttggttttctgtttcggttatgaaatggagacgtttgttctacgc

SEQ ID NO: 16242 - DNA, 354 bp, Gossypium hirsutum
  unsure (1)..(354): unsure at all n locations; Clone ID: LIB3829-016-Q1-K6-D10
tgnacatgctgcaactaccgtgnagnaaccactctcccgatnatgggatcatatgcagttcaaagacattatagtcaaagttgctagtgttgagctatattacaaggctgtccacttctacttgcaagagcaccctgatctcataaatgatatgttgaacgtgcttgcacttcgtgtggaccacactcgtgttgttgatatcatgagaaaggcaggtcatctgcgacttgtgaagccttacatggttgctgttcagagcaacaacgtgtcagcagtaaatgaggcgttgaatgagatttatgtagaggaagaagatacgatagattgagagaatctatcgacttgcatgataac

SEQ ID NO: 16243 - DNA, 598 bp, Gossypium hirsutum
  Clone ID: LIB3829-016-Q1-K6-D11
cggccgcgtgggtgtcaatcgagtcatcgtcttcatttgagaccaccgttgatgttgaggaaggaatggagattgacagaggttacatctcaccgcaattcgtaacaaatcccgagaaattaatttgtgaattcgagaatgcaagggtgctagtaaccgatcaaaagattacagctattaaggacataattcccctcttggagaagactactcagttaagagctccattgcttataattgctgaggatgttaccggagaggctcttgctacacttgtagtgaacaaactccgaggtatccttaatgttgcagccattaaagctccgagtttcggcgaaagaagaaaagctgtccttcaagatattgccattcttactggtgccgagttccaagcaaatgatctgggtttgttaatcgagaacacctctgttgagcagcttggtatagccaggaaagttatcatcaccaaggattcaacccaaataattgctgatgccgcttcgaaggatgaaatacaagctagggtgcaacaattaaagaaagaactagccgagacagattctgtttacgacacagaaaaactggcagaaaggattgc

SEQ ID NO: 16244 - DNA, 534 bp, Gossypium hirsutum
  Clone ID: LIB3829-016-Q1-K6-D12
ctctcttccaacctttttcagttccggcccactctaaacaagcgactaatatgtcgggttattattattactcagggtgcccagatcactacgaggctcattatctggatgcctgctccgtttgcggcaaatcgcttcataattccgatattttcatgtacagagggaatacaccgttttgcagcaaagagtgtagacaagaacagatggagatcgatgaagccagagaaaagaaattgaaatctggccgatctcttagaaaatcggattcaaagagctctacacccaacaaaactgttcggacgggcattgttacggtgtcgtaattacatcttctttttttctttaaatgataattgtatcatcatcaattttgaaaaaaaaaaacgaaaaaacaagatcgggacaagaatgggaaaaaaaaaagaaaccttcaatggaattttgtattttcgttttattattgggtatgatgtttgagaggagtggatgtttataaggggagggtatcggatgtgcagttttcattaatgg

SEQ ID NO: 16245 - DNA, 628 bp, Gossypium hirsutum
  unsure (1)..(628): unsure at all n locations; Clone ID: LIB3829-016-Q1-K6-D3
gnaaactgaaacctttgtccgtaaaaaaaacccttgtttttctctttgaaagagtgggcaagttcagagggaggtgcaccagaggttactctagaaacctctatgggtgccttcactgttgagctatattacaagcatgcacccagaacttgtcggaacttcattgaactttccaggagaggctattatgacaatgtcaaattccatagaattatcaaggattttatagttcagggtggagatccaactgggactggaaaaggtggagaatctatttatggtcctgtattcgatgatgagataaggtccgagttaaaacatactggagctggtattttatctatggctaatgcgggtccgaattcaaatggaagtcagttcttcattactttatctccagcgccgtcattagatggtaaacacacaatatttgggagagtatgtaggggaatggaaattatcaagaggcttggtagtgtccaaaccgacaacaatgacaggcctattcatgatgtgaagatcctacggacttcagtcaaagactagcaccggagttcggaaactgcgaattgtagttctatgaaatgcccatcgtttccccggatattttgaaattggatcattcata

SEQ ID NO: 16246 - DNA, 597 bp, Gossypium hirsutum
  unsure (1)..(597): unsure at all n locations; Clone ID: LIB3829-016-Q1-K6-D4
ggnagaaagaaaggcatctgttttgctctctgctcttcatatcgagatcttttctactgaagatatcgtgaatggctttgtcatgcttctggaatctgcagaagatctgctttggatattctggatgcctccaatgagcttgcccttttcttggctagagctgtcattgatgatgtgatagttcctttgaatcttgaagagataaccagcaagttgccaccgaattgcagtggaagtgagactgtgcgaatggctcgatcacttataactgcacgccatgctggtgagaggctcctcaggtgctggggaggtggaactggctgggctgtggaggatgcaaaggacaagataatgaagcttctggaggagtacgaaagtgggggtgttgtggctgaagcttgtcaatgtatccgtgacctcggaatgccattcttcaaccatgaggttgtgaagaaagcgctggtgatggccatggagaagaaaaacgataggatgctagacctgctgcaggtgtgtttcaacgaaggtctaatcactatcaaccagatgaccaaaggcttcaccagggtcaaagatggactcgacgacctagctctc

SEQ ID NO: 16247 - DNA, 583 bp, Gossypium hirsutum
  unsure (1)..(583): unsure at all n locations; Clone ID: LIB3829-016-Q1-K6-D5
gcattgccttctcattttctggtgtcagnagtcctggtcgtgatgaaccatattcagatgaagccatagcagtaatgagacggaagatcatgcagagagatgtggagattgaagtggaaactgtcgatagaactggaacatttttggggtctttgtgggagtccagaaccaatatggctgtgacactagttgaagctggcctggcaaagctacaaacttcatttggtgctgactggattcctgatgctcatcttctcgaacaggctgaacaatctgccaagaggcagaaactgaaagtaagtagctgatggacttatctttatcacacatattcttttggtgcttaatagaactttttggctttattatctttgaacttctaaatgcagatttgggagaactatgttgaaggggaggaagtttccaatggatctgcccctgtagagaacaaacaaaaggaattgctggaggttgttattactgaagtattgaatggtggaaaattttacgtccaaacagttggagatcagagagtatcttctattcagaaacagcttgcatctttaaatatccaagaggctcc

SEQ ID NO: 16248 - DNA, 600 bp, Gossypium hirsutum
  Clone ID: LIB3829-016-Q1-K6-D6
gtttaagtgttgaaattattgattttacttgtacccctagcagagagagaaaattacagaggaaaagaaaagaaaacttagaacgagcttcgtgggtggagcttgttttcgttgcgtttattattattatttctgatattcccaacacagagaaaggaagggatggagagcgattcagcgatggtggcatttccattgctgacaacgcccatcgaatccaactacagggcatgcaccattccttacagattcccttccgataatcctcgaaaggctacccctactgaaattgcctggatcgaccttttccgcaattccattccctccttcaagaagagagctgagagcgatactaccgtggttgatgcttcaactaaagctgagaaatttgctcaaaggtatgctgatatacttgatgacataaagaaagatccagaaagccatggcgggccacctgattgtattcttctctgccgacttcgtgaacaggttcttagagaactggggtttagagatatattcaagaaagtcaaagatgaagagaataccaaggctatctccctatttccagatgtagttcgtcttaatgatgatattgaa

SEQ ID NO: 16249 - DNA, 602 bp, Gossypium hirsutum
  Clone ID: LIB3829-016-Q1-K6-D7
aaagctgaaaaaagccagccgagaagaagccagccgaggcagaagaaagccgtagctgcagaaagccccggcagagaagaagcctaaggctggtaaaaagcttcccaaggaaggcggagcggctgccggagacaagaagaagaagagagttaagaagagcgtcgagacctacaagatctacatcttcaaggtcctgaagcaagttcaccctgacatcgggatctctagcaaagctatggggatcatgaacagtttcatcaacgatatcttcgagaagcttgctcaggaagcctctaggctcgcgaggtacaacaagaaacccaccatcacttccagggaaatccagaccgctgttaggcttgtacttcccggtgagcttgccaagcacgccgtttctgaaggtaccaaggccgtgaccaagtttacttcatcttgaaaaggctattagttgatctgtagttggggttagggttaggaggttgctttttaaattagatcggtgtggtttttatgtttatttttctgaaatttctgcatatttattttgatatatggtttgtattggcgagatggatctactcgatcctgatatgactattgta

SEQ ID NO: 16250 - DNA, 577 bp, Gossypium hirsutum
  unsure (1)..(577): unsure at all n locations; Clone ID: LIB3829-016-Q1-K6-D9
atttggccaccaagnaaatgcccgncaagccgattctggctgccgtgnaatcaggnaaaatcgcattcttgatccaaagaagtcacagaacattgccattttattgagagcactaaatgtgaccattgatgaagtctgtgaagcacttatggaaggcaattcagacactcttgggattgagctcttggaaagcttattaaagatggctccaaccaaagaagaagagcataaactgaaggagttcaatgatgaatccccttttaagctaggtcctgctgagaaattcctcaaggcagtgcttgacataccttttgccttcgagagggttgatgctttgctttacattgctaattttgactctgaaattgagtacctgaaaggatcttttgaaactttacaggctgcttgtggagagttgagaaatagcagaatgtttctgaagcttttggaggcagtactcaaaactgggaaccgcatgaatgttggcaccaaccgtggtgatgcacatgccttcaagctcgacacactcttaaaacttgttgatgtgaagggcacggatgggaaaaccacacttctg

SEQ ID NO: 16251 - DNA, 597 bp, Gossypium hirsutum
  unsure (1)..(597): unsure at all n locations; Clone ID: LIB3829-016-Q1-K6-E1
cngagtggggtacttgggaggagcttttgttaggtggggcagttctccgccatggtacccgagattggaacctcgtcgcttcggagctccgaacctgagctctttctccttttgccttcactcctgaggcatgtaaggccaagtatgaggatctacaacgacgttactcaggttgcaaagcttggtttgaggagttacgtaaacaacaaatggctgatgtgaggcaagctttagaggaatccgaagattcaatcgggtctctggaatcaaagcttgaaagcctaaaagttaagaaaagaaatgattcaagggttgattatgattccagtccaacagaatcaaccttaccatgtcctaaatccgagggatttaagttttccagtaaggacacatgcaaggatggcctctctgctggtagttttacgcaggaggcccagacaaactgggcgcttgattgtcagattccagctgcagtgcctactgaagatatggattccaagccagtaggagatgcactgacctatgagagggagaaattttcaagcattgataagttggcagatgctctacttggaggaaagttaccgtgtatgcgga

SEQ ID NO: 16252 - DNA, 572 bp, Gossypium hirsutum
  unsure (1)..(572): unsure at all n locations; Clone ID: LIB3829-016-Q1-K6-E10
gttaagactctaaccggcaanaagatcactctcgaggtcgagagctccgatacgatcgacaacgtgaaggccaaaatccaatataaggaaggcatccctccagaccagcagcgtctgatcttcgccggaaacagctcgaagacggccggaccttggccgattacaacatccaaaaggagtcaactctccacctcgtcctccgtctgcgcggtgggatgcaaatcttcgtgaaaaccttgactggcaagacaatcactctcgaggtcgagagctccgacacgatcgacaacgttaaagcgaagatccaagacaaggaaggcatccccccagaccagcaacgtctcatctttgccggaaaacaactcgaagacggccgtaccttggccgactacaacatccagaaggagtcaactctccaccttgtccttcgtttgcgcggcgggatgcaaatcttcgttaagacgcttaccggaaagacgatcactctcgaggtcgagagctctgacacgatcgacaacgtgaaagccaaaatccaagacaaggaaggcatcccgccagaccagcaacgtctc

SEQ ID NO: 16253 - DNA, 580 bp, Gossypium hirsutum
  unsure (1)..(580): unsure at all n locations; Clone ID: LIB3829-016-Q1-K6-E11
gggagtccttncgccgaaacacggctctgctagcggaaccttcctttccctccctccaatcgctagcaacgaccccattatctcctgggtttggtcttgcatcgcaaccgtccaaatgggccaattaaccgaccgaatcgaagccgccaacaacctcgcttccctcgctcaagacaacgaccgaaacaaaaagatagccgttgaagaaggcggcgtccctcctttgctgaaacttcttaaagaaagctcctcaatggaagcgcaaatcgccgcggctaatgcccttcttgttttggcaaacgaaccggaaagagttcgcagtattgttgaagaaatgggggtcccaattgtggttcaagtgttgcgagattctccgatgaaggttcaaatccccgtagcgaaattgatagcgagaatggcggagtatgatccggtggctcaagaggatttcgccagagagaatgtgattaggccgttggtcactttgttgtcgtttgagacattcgtggacgattctgggactcttttgggtaagcaaagcatccattccatagttcaaattaataaagaaatggagaaa

SEQ ID NO: 16254 - DNA, 587 bp, Gossypium hirsutum
  Clone ID: LIB3829-016-Q1-K6-E12
ggaccgtgggctcttttgatctatattactaaagtgggaaagtagcagagaaagagtgcttaatttgattgaacagttaatgaatcaattgcttaagttggatggtattatggctgatggtgatgtcaaattgcaaagaaaatgcaggtgagcagagttcaaaaatatgttgaaacattggatatgttgaagattaaaaacgccatgcctagtaccaatggagctcaatccgaaacacagaatcgacataagcatagtgttcgaaaacaagagcagcaatccaggcaaagattagcaccaatccaggagcaacaatcgagcaactcggtttctcatttgccaatccatcaacaataccagcacaagcatcagcaccagcaggcatctggtccggtcgtagttactacgaaatgggaaacattcgattcatccccggcaacattgccggtcacctcgacatctacatcttcatcaaccgctaataactcagccccaccgaagttcccctgggaattcttcgattaaagacagtatgccactatgtcctctttggtttttcatttcattttttatctgtgtgaatgtgc

SEQ ID NO: 16255 - DNA, 625 bp, Gossypium hirsutum
  Clone ID: LIB3829-016-Q1-K6-E2
cgatccctttcactgcaccggtcccccatgaacatcctcaaagcttcggtttcggagccaacaacaagccaaccccatcaatgcaaaactccgctgtcgctcaaggtccggacgatgacgtccctgctcctgctcagcagtttgctcagtttggtgcggggtgtttttggggcgttgaattggcgttccagagagttccgggtgtcaccaagacggaggtcgggtatacccaagggttcagggataatccgagttacgaagacgtctgttctgggactacgaaccataatgaagttgtgagggttcagtatgaccctaaagagtgcagctttgacactttgcttgatgtcttttgggctcgccatgatcctaccaccctcaatcgccaggggaatgatgttgggacacaatacagatccggtatatactattacacaccagagcaggagaatgcagcgcgggagtccatggaaaaacaacagaaactgttgaaccgaaagattgttacagagcttctacccgccaagaagttttatagagcagagaaatatcaccagcagtaccttgcgaaaggaggtcgatttggtttcaaacaatctgcagaaaaaggttgcaacgatccaat

SEQ ID NO: 16256 - DNA, 613 bp, Gossypium hirsutum
  unsure (1)..(613): unsure at all n locations; Clone ID: LIB3829-016-Q1-K6-E3
cggggnagnggagaggnaatggtagtgagctgaaaagacaaacctttttctcagaaggtcactgatgtgcgagcacgttaacatatagcagcaaagatttcttcttagcactttcaaaatctctcacggctccttttataagtcaggatgcattgaagtttgaatgttggctgctcatcttgggtcaattcaactgaatctcatgtccagcaatcatcatgtctgaaagtttaaacttgaagatgggaattgtacctcaacactttcataatgccaagcagctaagttttcaatttcaagaccaggactcatcatcaactcaatcaaccggccaatcttaccctgaagcggctagtgttggagatagcaatctttatgggcaaagttcaatttcagcatcatcaggaggtaatgaaactcctgggaagcttgttgaacatcatgctaaattagcctcgtcaatgggaactcaggaatatgtcttctctccttcacaagttgactatagcaaatcaattcagactcatattccgctccattgtgctgaaccgtattttggtggtgctgtgactgctgtttgcccacctccagctatgagtcatcatccttgtat

SEQ ID NO: 16257 - DNA, 618 bp, Gossypium hirsutum
  unsure (1)..(618): unsure at all n locations; Clone ID: LIB3829-016-Q1-K6-E4
gctgatttagtttaagaaaactttccttagagcataaaagaaagttacgaacatgccgggtgtcaatcctgaaattgagttcccagccattgagtttcgtttatcggatttgaagcgaggaactgaaggatggaaccgtttgtgcaagagggttcaagaggcttgtgagactttcgggtgtttcgaggtggtatatgaaaaggtatcgactaaactccgagaggatgcgtttgggttgatgaaagaaatggttgagctcccagtggagacgaaacagaagaataatagtcccatgccttaccatggttgggttggaccatgcaagcaggtttctgtgttgtatgaaggctttggagttggagatgcctccaactatgactctgttaaaagttttgctcaacttatgtggcctaatggtcacccacacttttagtgacactattcataccctagggacgcaaatggaggagttgaacaagttaatttggttaatgttaattgatagttatggattaggggatgactcattgaagatgaactacacaacgttggtgcggatgatgaaatatatggcccctccaccaggagagtatgaaagaggactctntgctcatactg

SEQ ID NO: 16258 - DNA, 520 bp, Gossypium hirsutum
  unsure (1)..(520): unsure at all n locations; Clone ID: LIB3829-016-Q1-K6-E5
atccggnacagnataacttgtatggtgatcttaatgtgttggggtggtgaagtatttaattaagaatagtatggttgagattgtgcaggcatgggggcatgccaatgttaaagtgaagtatgttttggatatgaaaggtgcaagttgcgtcatccactacatgagtgggaaggacacggatgaaatggtgatataattttattaggaaaataaacagtcgctttttttgttctaaaaaaaaaaaaaaaaaaaaaaaaaaaaaaaaaaaaaaaaaaaaaaaaaaaaaaaaaaaaaaaaaaaaaaaaaatgatataaaaatatataataaaaaaaaaatacaaacaataataatattttaagaaaatatataatcaacttcatatttaaaaattaaaactgagaatgggcgccctgtttataagattaaagttcttttatgttgtgttgcggatttgagttttttttcaatgggggtctatgtggaattgcgaacgctacgatacacaacttttttttcctt

SEQ ID NO: 16259 - DNA, 328 bp, Gossypium hirsutum
  unsure (1)..(328): unsure at all n locations; Clone ID: LIB3829-016-Q1-K6-E6
naaaaaaaaaaaaaaaaaaaaaaaaaaaaaaaaaaaaaaaagaaaaaaaaaaaaaaaaaaaaaaaaaaaaaaaaaaaaaaaaaaatacaaaaaaaataaataataaatatagagaaacctaaaataaaataaagggggcgcgtcttttgaaagaccccacgttctgggaacccccgtgatcggaacccaatattatttgtttttggggcccatatctttctttttccagggccgcgggatttcccaacgaggccccccacgaaaaaccctgggccatcaccccctttaatccgcttggcgaaatggcccccttccatgccagtggggc

SEQ ID NO: 16260 - DNA, 597 bp, Gossypium hirsutum
  Clone ID: LIB3829-016-Q1-K6-E7
gctcaattgggtcttaggtggtaacagctcaaatcttgaagggaggtccttaagttgcagactctcagacaaggcaagtgaccaattgcagacatggtttgaagacaatgacgcactcgagcagactattaatggagagtggttcttattgtcagttgggaacgaagcagctacctcacaacctatttgtttaagtagggatgagaacaaatcgtttgtgatcggaagtgaaaagaatgagaattttccaggaaaatcagtggtgatacgttcacctcaggtatcaaaaacacatgctcaaatcatctataaagaaggtgcattcttcctaattgacatgcagagtgaacatgggacctatatcgagcatgaagggagaagatcttggataccttcaaatgttgctattcgactccgaccctcggatgttattgagtttggttccgataagaaggcagcattgcgggtaaaggtgatgagatcgcctccaaagattgcctataacgaagatggtcaacttcttcaggctgtgtgaagattttatgcagctcttgttctctaatttattgcaattgtatagcattttgaggattgaca

SEQ ID NO: 16261 - DNA, 596 bp, Gossypium hirsutum
  unsure (1)..(596): unsure at all n locations; Clone ID: LIB3829-016-Q1-K6-E8
tccgcggncgcgtggggccaaatggtgagagcactataggttgaactgggcatcctttagttcaggcgataggcgagatgagacccctgagttcacaatctttgttggagacttggctgctgatgttacagattacatgcttcaagagaccttcagggcacactttccttctgttaagggtgcaaaggttgtgattgataggatcactgggcgcacaaaaggttatgggtttgtcaggtttggcgatgaaactgaatataatcgtgccatgactgagatgaatggtgctttttgttcaactaggcctatgcgcatagggccagctactaacaagaagactggtgctgcacagcaatatccagcagcttcatcgcaagggactcagaacgagaatgatccaaataatacgactatatttgttggtaatttggattctaacgtgactgaagaccatttgagagaggtcttcagcccatatggtcagttggtgcatgtgaagattccacaaaacaagcgttgtggatttgttcaatttgctgataggagttgtgctgaagaagcactccgaatactgaacgggactcagttgggtggac

SEQ ID NO: 16262 - DNA, 614 bp, Gossypium hirsutum
  Clone ID: LIB3829-016-Q1-K6-F1
ctttggttggctcactcataggtttcattgttgtaaccttagtcaagcctccctacccatacttcaagttctcaatcgtacaaatcgggattggaaacattgggaatgtaccacttgttctgatcgcagctttatgtagagatacatcaaatccttttggggacacagacacttgtaccactcagggaactgcatatatttcatttggacagtgggttggcgcaatcattctatacacatatgtatttaatatgttagctcctcccgtggaaggtacctttgaccttgaagatgcaagtcttccccttaagatccctcagaaggatgtctctcctgagcaagctccattgctggtgcaagaggatgcatcagtggattcagataattcagatacgaaaggaaagattaaaagttttcttgtttttatttatgagaagttaaagctcaagcagattcttcaacctcctattattgcttcaatcctagccatgattcttggtgcagtgccgtttctaaagaaattaatatttacaagtgatgctccactttatttcttgacagatagctgcattattcttggggaagccatgatcccatgcattttgctggcacta

SEQ ID NO: 16263 - DNA, 447 bp, Gossypium hirsutum
  unsure (1)..(447): unsure at all n locations; Clone ID: LIB3829-016-Q1-K6-F10
ggcccagcctttgcttctccaagcgagtgattgcatgtcttattgaaaggagattgaattcgagactgtccctgttgatttgcttaaaggagagcacaaagaccctgaatttctcaagctccagccttttggaacagttcctgtcactcaagatggagattatgttttatatgaatcccgtgcaatcataaggtactatgcagaaaaatacaaatcacaagggactgatctactgggaaagacagtagaggaaaggggtcaagtggaaaattggctagaagttgaggcacacaatttcaacccatcaatttacgccttgaccctacatgtgatgtttgcttccaagatggggttccctcctgatgaaaatntgatcaaggaaagcgaggaanagctaggcaaagtgctggatatttatgaggagaggctgtcaaagaacaagtactt

SEQ ID NO: 16264 - DNA, 589 bp, Gossypium hirsutum
  Clone ID: LIB3829-016-Q1-K6-F11
cggccgcgtgggttgccatttgccttaatcatcttcctctttctttaaaacctcttcctatttaatttccgactaaacttgcgctgaattccatggctactgcagaggttgtatcagctcagactgcaatccatgaggagaaacctgaagaagtggtcaaggttggagaaattgcaacagaagaggtaccggctgttgctcctgcagcagaacctgttgctgaagaaccaaaggaagcagtgcctgaagcagcatccggagaaccccaggctccagaaactgaagccacagttgaaactgaatcaaaggaggtggttaaagagcccaaggctgtgactgaggagccagaagttgagaaaaaagaagaagagactcctaaggaaacggtagcagagccagttgccgaggagtccaaggagtccaaggagacttctgagccaacagttgaagaaaccaaagaaagcacagagtctacagaagcagcagcagcagcagcagcagcagcagcagaagtaaaagcagaagccgaagccgccccagtggaagcacccaaagaggaagctgcaaaggaagaagagaaaccagctga

SEQ ID NO: 16265 - DNA, 609 bp, Gossypium hirsutum
  Clone ID: LIB3829-016-Q1-K6-F2
ggcatttgggtcttttggtttacattgaggggagtgttgggttttgcgggaagagtcgatgggtgtttgtggtggttggcaggtgcgcccgtgtcggggtctgaaaccgccatcttactcggcggttgcagcagtagaagaagggggttttggcaggaagtgtcagtgggtgtcgtgttggttgggaggtgcgcccgtgtctgagtctgaaaccgccacttgacacggcggtctcagcggttttggcgggaagagtcgatggggaggtgagctcgtttcagggcccgaaacagctagctgggacaatccctttcagttgcataattcttctcttatcaggcaaattaaacgctgtcattagtcttcctctcttggctttcactttcagatacatattggcaaattgcttggaatttcgatctaatttcgaaattaatgaatcccctttccttttgctggcttaaatatgaattgtatccaagctgaagcaatgttgggtattaggctattagccatctttttaataggaaatttctcctcctccatttggcgccgtcgaggcccaggttggctcagcggagggacctgtctatgtacatacccctttga

SEQ ID NO: 16266 - DNA, 606 bp, Gossypium hirsutum
  unsure (1)..(606): unsure at all n locations; Clone ID: LIB3829-016-Q1-K6-F3
gcaccacctaaggnanatccaagttaatggtggaactattgcnagacaggttgattttgcatacaagttctttgagaagcaagtcccgattgatgctgttttccagaaggatgaaatgattgatatcatcggtgtcactaagggtaaaggttatgaaggtgttgtgactcgttggggtgtcacacgtctgccccgtaagacccacagaggtttgcgtaaggttgcttgtatcggtgcctggcatcctgctagagtctcctttacagttgctagggcaggtcagaatggataccatcatcgtactgagatgaacaagaaggtttaccgggttggcaaggttggtgacgagacccactctgctattaccgactatgacaggactgagaaagatatcactccaattggtggcttccctcactatggtgttgtgaagggtgattatctgatgatcaaaggtggctgtgttggacctaagaagagggtggttacactccgccagtctttgattaaccagacatctcgtgtagctctagaggaaatcaagctcaagttcatcgacacctcatcaaaatttgggcatggacgtttccagactacacaagaaaa

SEQ ID NO: 16267 - DNA, 587 bp, Gossypium hirsutum
  Clone ID: LIB3829-016-Q1-K6-F4
tctctttcttcttactttcttttcaatctctgcttctaacagcgtgttttattcaatccacgaaaatacgtgtaaatccttcacatccagggaggccaatgcggtaaccaaattggggctaagttctgggaagtggcctgcgctgaacacggtattgactccaccggagaaataccatggggactctgatcttcaactcgagaggatcaatggttattacaacgaacctaggtgtgggaggtatgttcccagggctgctctcatggatcttgaacctggcaccatggatggtgccaggtctgggccttatgggcagatttatcagaccagacaactttgtcttcggccaatccggtgctggaaacaactgggctaaaggccattacaccgaaagtgctgaactcattgattccgttcttgatgttggccgaaaagaatccgagaactgtgactgcttgcacgggtttcacagtttgccactcgcttggtggaggcacaggatcatgaatgggaactcttttgatttcaaagatcacagaggagtacccggaccagatgatgctcactttctctgttttgccatctcc

SEQ ID NO: 16268 - DNA, 576 bp, Gossypium hirsutum
  unsure (1)..(576): unsure at all n locations; Clone ID: LIB3829-016-Q1-K6-F5
gngnacttatacggtttttgatcaagnagttgagaatgccgcgtttacagatattgaggatgtcgtgccttttgttaaatggctggacgacgagctctcttacttggtggatgaaagagcggtgctaaagcattttgaatggccagaacagaaggcggatgcattgcgggaggcggcgtttgggtattgtgatctcaagaaactagaatccgaggcttcattgtttcgtgatgatccccgccaaccttgtgctccggctctcaagaagatgcagactttacttgaaaagttagagcatggcgtttacaatctctcgcgaatgagagaatctgctacaagccgatacaaaggtttccaaattcctatggattggatgcttgaaactggaattgtgtgccagatcaagctagcgtcggtcaaattagcgatgaagtacatgagacgagtatctgccgagctcgaagcagttgggggcgggcctgaggaaaaggagctgattgttcaaggagttagatttgcattccgcgtacatcagtttgctggaggattcgatgtcgaaacaatgagggctttcca

SEQ ID NO: 16269 - DNA, 523 bp, Gossypium hirsutum
  unsure (1)..(523): unsure at all n locations; Clone ID: LIB3829-016-Q1-K6-F6
ctagtagnaagtttagttttacaaacatggctagttccggtgtccttaagttggtttccatgattctcatggtgtgcatgacgatgatgagtgcacccaaggcagccaaagccgccatcacgtgcagcgacgtggtgaaccacttgatcccgtgcttgtcctacgtacaaaacggcggtacacccgctgctgcatgctgcagtggggtaaaagcactctacggcgaggttcagacctccccggaccgccaaaacgtgtgcaagtgcatcaaatcggcggtgaacggaattccgtacaccagcaataacctcaatctcgcagccggcctacctgctaaatgtggtctccaactcccttacagcatcagcccctccactgactgcaacaaggtgcagtgaggttgatgatgatgatatggaaggagtggaagaaggttccagctcagctagataaagtagctagctaaggttaaataagctgtgttggtgtgttgttttttagaaaattccatatataatcgggg

SEQ ID NO: 16270 - DNA, 597 bp, Gossypium hirsutum
  unsure (1)..(597): unsure at all n locations; Clone ID: LIB3829-016-Q1-K6-F7
cggncgcgtgggctgaaaggctggctgagccatagatacgagagagaactgatgctcttgatgctgcagggaacaccactgctgctattggaaagggttttgccattggttcagcagccctggtgtcccttgccctttttggtgcttttgtgagccgtgctgcaatttcaacagttgatgtattgacccctaaagtttttattggtttgcttgtcggggcaatgcttccttactggttctctgctatgaccatgaagagtgtgggaagtgcagctttgaagatggttgaggaagtgcgcagacaattcaacacaatcccaggtctcatggagggcacttccaagcctgactatgctacctgtgtcaagatctctactgacgcctctatcaaagaaatgatccctcctggtgcccttgttatgctcacaccccttattgttgggatcttttttggtgtcgaaactctctctggtgtccttgctggatctctcgtctctggtgtccagattgctatctctgcatccaacacagggggtgcttgggataacgctaagaagtacattgaggcggctgcttcagaccatgcaagggctcttg

SEQ ID NO: 16271 - DNA, 576 bp, Gossypium hirsutum
  unsure (1)..(576): unsure at all n locations; Clone ID: LIB3829-016-Q1-K6-F8
ctcgctttccnctttgatttttgctgacactgactcactgagtccaaaattccaccacctccttccttcatcaaccatgagccgtttcagggtaactgacatcttcgacccttactctccctctctgtgtgttaaagaaacctccattctcgctcacaagcccttagcttttccctcattttttgaagcagaacatgaacttagctccgccctcgacctactgagtcctttcccttgcttaagccccttcgatatctacgacaacgtcaccgatctggtccaaatcgagagaacgccgtcgtttcgttcgtacaagagggtacaacgccgagtcgaacctgagttttctattcaaaccttgtgcgaccgagttacggcgctggagtctaaattcgaccgtctcgttaacgggaggaactccggaggggacaggaagtacacgtggactgcggagatcaaggggccggttgaaaggaagtacaaatgggtagcggagatcaaggatgggaagaagacagaagaggtgaaagagaaaaagtataaatggacggctgagattgaaggaaagggaattga

SEQ ID NO: 16272 - DNA, 577 bp, Gossypium hirsutum
  unsure (1)..(577): unsure at all n locations; Clone ID: LIB3829-016-Q1-K6-F9
ataaggatgtcattcaggctctcagaccaaggtagcgacgagaatcccanaaactatttaacatttttctgccttgggaaccgagaggttaagaagagtggagaatatgaaccttctgaaagaccagaccctgatacagattatgccagagctcaggaggcccgtcgtttcatgatctatgttcatgcaaaaatgatgattgttgatgatgaatacataataattgggtctgccaacatcaaccagcgatccatggatggtgctagagactctgaaatagccatgggagcctatcaaccatatcatttatcattaagggaaccagcacgaggtcaggtccatggtttccgtttgtcactgtggtatgagcaccttggcatgcttgatgacacattcctcgcaccagaaagtgaagagtgtgtcaggaaggtgaatcaggttgctgacaaatattgggatctctattcaagtgagtcacttgagcgagacttgcctggacacctactccgctaccccatcggtgtttctagtgatggatctgtcactgaattgcctggcatcgagttcttccctgaca

SEQ ID NO: 16273 - DNA, 602 bp, Gossypium hirsutum
  unsure (1)..(602): unsure at all n locations; Clone ID: LIB3829-016-Q1-K6-G1
gcagaagtgcagtagtctcttatcctacatcaacggaatctcttggccgtggaattgacttgatacaaaatgggcaaaagtatcctttcacatttgacaaggttttcaatcctgaagcttcacagcaagatgtttttgtggagatatcccagttggtccagagtgcccttgatggatacaaggtttgtatatttgcctatggacagacaggatcaggtaagacttatactatgatgggaaggccagaagcccaagagcaaaaagggttgatacctcgttcgttggagcagatattccaaagtagccagtcactgcaggcacaaggatggaaatacaaaatgctggcttcaatgttggaaatatacaacgagaccattcgtgatttgttatcaaccaatcgatctattggttcagatccaacgcgtgcagaaagtgcagtttctggaaagcagtatacaattaaacatgatgcaaatggtaatacacatgtcagtgatctgaccattgtcgatgttagtaccataacagagatttcctctcttttaaggcaggctgctcaaagcangtctgtgggcaggacgcagatgaatgaacaatcgtct

SEQ ID NO: 16274 - DNA, 577 bp, Gossypium hirsutum
  unsure (1)..(577): unsure at all n locations; Clone ID: LIB3829-016-Q1-K6-G10
tatagccttcctaattggnaaactatgttatgcaaatgggtacctttcacaatgggaccaatttactgcacaagttgagccgattgcttcaaccgttcctttcatgattgcaagtggtaaccatgagcgtgactggccgggaagtggatccttctacgggaacaaggattccgggggagaatgtggcgtgttggcggagactatgttttatgtccctactgaaaacagagcaaagttctggtactccacagactacggcatgttccggttctgtgtagctgacacggaacatgattggagggaagggacagagcaatatcaattcatcgagcactgccttgcatctgttgatagacaaaagcaaccgtggctgattttccttgcacatagagtgttgggttattcttctgcaaccttttacgctgatacgggatcttttggggaaccaatgggaagggagagcctccaaaaactttggcagaaatacaaagttgacattgccatctatggccatgcacaccactatgaacgtacatgtccgatttaccagaatatatgcaccaacaaggagaaacaa

SEQ ID NO: 16275 - DNA, 595 bp, Gossypium hirsutum
  unsure (1)..(595): unsure at all n locations; Clone ID: LIB3829-016-Q1-K6-G11
tgagacgcanaaaaagcaaaatttttttcatctgttatctttcaacagtctagttgtagcggaagtgggagtggcatacagactcaaaaatccacaaaatcaaagagtggtggttcagacaacaatactgngaaataataaggaggatgacatcggaagtgtgggattgaatgcgcaggaaagaagtgacaatggaagtggcactcagagctcgtggacaaagagggcgatagaggttgacagctcccagccaatatcagcacgagaccaggtcatgcattcaaggtctgaagtgcttggtaatagctgggttcctgtaacaatcacgagggagtgtgacagtcgggatgatgaacttggtatgtgcggaactgttaatggacttccactatttatactgttgttttctttttctttgattaaattgtgatgcatcacaatgccagacaatgcagttaagggaaaagatttagagataggagttcctaaaattacagctttgcagcttgaaaacccaagtgaaaaggtcaataccaacgcagcaggtggtaatcaagaaaaattatctgaactcaaccctagtaaagatgatgag

SEQ ID NO: 16276 - DNA, 421 bp, Gossypium hirsutum
  unsure (1)..(421): unsure at all n locations; Clone ID: LIB3829-016-Q1-K6-G2
acaccttctggaggcaccagagttattcagaattanaggtacaacgaaaggtacttctaaagctgtgtgtacagcctaatttatgcccgggcccaacaagcagagacccaaggatcaaacctacccaaacaagcccattacagcaaggcccaacaaaggtcagcatagggtttcagcttttctgaaaccctagctaaggcgccgcacgtccctgggggctcctaacgtctaccgccgctctagtttctgccaccaacgccaccagctatttccatcaattacctgcaaggacagcacgcaaagcaaaggcaaaaacaatgcaaaataatagaaatagaaagatgtattaaaatcggctatataaggagacaaacaaaatgtaacaggggtcttttttttcggtaattaagaagaacttaat

SEQ ID NO: 16277 - DNA, 567 bp, Gossypium hirsutum
  Clone ID: LIB3829-016-Q1-K6-G3
attgcactcattagcctgtctctctggaatccctattgagaacaaatagagagtgcttcaaaaatctttcaaagagatgatatctactctccctaaagagaattgttggggtattcctgaagctctatatcaatatcagggtttttggctcacccccccttttctacaaggagcattgtcggctcaacaacaattccaggctcaacccactgatatcatcctttgtagctctccaagaacaggtgcagcctggttaaaatccctcactttcgccactattacaagaacttcatacaatgattccaccacccctttactttccaagatgcctcatgatgttgtgcctttcatggagttcgatcatgcccagttttccactaatcgacatcttggaattcctcttttagccactcatcttccttattccttcttacccagatctataattgattctggttgtaaacttatttacatttgcagggaccccaaagatacatttgtttcattgcatcatttcaatgcaaggtacaacaaatcccaaaatactcaacccgttcaacttgatga

SEQ ID NO: 16278 - DNA, 250 bp, Gossypium hirsutum
  unsure (1)..(250): unsure at all n locations; Clone ID: LIB3829-016-Q1-K6-G4
aaagctgtaattatggctctctgttacggaaatccaggattgaccaacgaagtaatggcgtgngaaaaaatcggagtccccngaaatcgatgccggtcttctaatgtcgttgttagaggaatcacagtgtgaggagtactgcaatgaggagcaggtaactagtttgatggaatctctagaagctgagattagaatggtgaatgctggttcatgcagtattgaaggagacattggaagcaacaattacttt

SEQ ID NO: 16279 - DNA, 602 bp, Gossypium hirsutum
  unsure (1)..(602): unsure at all n locations; Clone ID: LIB3829-016-Q1-K6-G5
gttggaatggatactctctctatgattgtactgctgagtttagattctattggttgaactcgaagctcgaagagagcggtgcttgcaatgcaccttcacattatcataaatttaggttcagtgctgttccagtgtataattgtgattcgagtggcctatattcagcatacactggagttgtgccatatgctaaggatggattactgttttataacaagcatgcactctatcaaactggcaatacacctctagcattagtctggaaggatgaaaactgtagtcaatatgttattgacactgatggtaaaggagagattccaagccaacaacaggtagttttggagctgcaagatgatagaaaactggtaacatcagatgaccctcccgtgctgtttggctgcttagacggggatataatagaaaagtcagggctgcatacagggaaccttttacggtttgctattggtgatggaggattgagttttgcagatgggaagcttgagaaggctgatttgatttatcttggcaagtccaaccgggcacgtgcttttgcagatagttactcaaaggttntgttccagttcatggttcgacattctcct

SEQ ID NO: 16280 - DNA, 287 bp, Gossypium hirsutum
  unsure (1)..(287): unsure at all n locations; Clone ID: LIB3829-016-Q1-K6-G6
ggggnatcttggttgccagcctagcagcttctgctgaacctgcggtggtgngaaaaggaaaaggaagatggagaggggcgcaagcgcaaattggatgacagcagtgatagccctgctccggttgttgctaagaaagccaaggtgaggaaggtgaagctgaagttgagaagaaagagaaaaagaagaagaaacataagaagagtgaagaggatgctgatgctgaaactgaagagaagttgggaaggaaaaaaagaagaagacaagataaggttgaagcttcttcacca

SEQ ID NO: 16281 - DNA, 587 bp, Gossypium hirsutum
  Clone ID: LIB3829-016-Q1-K6-G7
cttgtattaaggtaactgaccaggacagctgccaggacaatgcttaaatttgtttgcattatcgaccactgttactaaaataactgtgggccaagctatatatgacatgggtgcattgttaattttcatagttattgagcaatgataaagagacaaagatatttttctaatcgtagaaggatatatgattctaggtgttgaaatgcatgctggataacattagagtggtttaacttcaaacaatttggaaaagctatatgcaaactgataataaaatcgagagtttctctggatataggttagaaacaaattttgtaacactgtagtttttgtgtatttacttgtttttgtttttattactatgtttcatagtagttgactaacatgtgcatacagatcttatgcttgcagggatcaccagatggacctgaacagtaagttatttttttttgggttatttatgctttcaacctctggcctttagactcaaagaaatattttttctttcagatatgttgcaatcatgaacgcgatattctctgcccaacgctcttcggttcctatagattcttgttacctaggttcta

SEQ ID NO: 16282 - DNA, 233 bp, Gossypium hirsutum
  unsure (1)..(233): unsure at all n locations; Clone ID: LIB3829-016-Q1-K6-G8
gctcagnataanaggttccgactgttgtttcgattaccagaagatgagactgaanatactgctcgccgcagcagtgggtgtggaaagattgccttagaagctgctgcatcccaggagcgaagcttcctttatatgctttcaggaaactgaacaatattgagagtgaaaaagtggtgcttggaattgagaacaaagaaccccctgttgcttttcttgactcgctcattcttggg

SEQ ID NO: 16283 - DNA, 505 bp, Gossypium hirsutum
  unsure (1)..(505): unsure at all n locations; Clone ID: LIB3829-016-Q1-K6-G9
gctactaanaccctgnatagaggtatctcggagttcattgtgatggctgctgataccgagccccttgagattctgctccatcttcctttgcttgctgaagataagaatgttccctacgtatttgttccttcaaagcaagcacttggacgtgcatgtggggttacaagacctgtaattgcatgttctgtcacatcaaacgaaggaagccaattgaaatcccaaatacaacaactcaaggatgctattgagaagctcttgatctagaatcttatgaaaacacatattcggtgtgatgggcctctcggattgtggtggtcgctcctttagaggctttgactgatgaagttatgccacatgcgaaccactctgttagaatctgactttaaatgtgattgttgtgacttatcacattttcttatgaatttagagaaaggataatcttgaattgatgcataccgaaacttagtatgaatgatatgctattaattaatgtagcttgtttaat

SEQ ID NO: 16284 - DNA, 623 bp, Gossypium hirsutum
  unsure (1)..(623): unsure at all n locations; Clone ID: LIB3829-016-Q1-K6-H11
cccggngtcgacccacgcccgtccgcaagttcattgggnntttatgtaagaaaaanaatgatgaaaagctttatgttccaccaacagcaacagcaacagcaacagcaacagcaacaacaacaagttttggaagagaatatgtctaatttgacttcagcttctgcatctggtgaagccagtgtttcatctgggaatagaactgaagctggttctaattatcctcaacagtacttcaccactagtcaacaacctcaaactcagccagttaagagaaagagaaacctaccaggcaacccagacccagatgcagaagtgatcgctttgtcgccaaagacactcatggcgacaaatagattcgtgtgtgagatctgcaacaaagggttccaaagagaccagaaccttcagcttcatagaagagggcataatttgccatggaagttaaagcaaagaacaaacaaagaggtgaggaagaaggtgtatgtatgtccagaaacaaactgtgtgcaccatgatccgtcgagggcgctgggggacttgactggaatcaagaagcacttctcgaggaaacatggcgagaagaagtggaaatgtgaaaagtgttcgaagaagtatgcggttcaatc

SEQ ID NO: 16285 - DNA, 585 bp, Gossypium hirsutum
  Clone ID: LIB3829-016-Q1-K6-H12
gtccctccattactgtccctccattactgttcctcccgtaaagccaccagttgacctccctccaattgcaaaaccacccatcacagtcccaccagtgaccgtcccagtcccaccagtgactgttcctcctgtgaaaccacctatcaacctccccccagtaacagtgccaccagttactaacccaccaagtgggaaaccctgcccacctccaccatcaaccaaggccacttgccccatcgacacactgaagttgggtgcttgtgtggacctactaggaggggctgtccacgttggtgtcggtgaccctgtcgtaaatgcatgctgcccggtccttaagggactcgttgaacttgaagctgctgtgtgcttatgcaccacccttaagctcaaactcctcaatctcaagatttatgcacccattgctcttcagcttctcatcagttgtgggaaaactccccctcccggttacacttgctctctctagacctaaggttggtaggttcttatgacgaaataggacaaatgagagggagtcaccattttatcaattgaattggaaagctatgctggctaggctcttatttt

SEQ ID NO: 16286 - DNA, 603 bp, Gossypium hirsutum
  Clone ID: LIB3829-016-Q1-K6-H2
ggaaaaacaaaaaaaaaaagaaaagaaaaaagaaaggaggagacacgaacccagaattaaagaaaaactacagcaaagaaggttctgtgtctcctgttattgcggttcgaagagaggatagcaatggaatacgagagtaacaattggatttgggacggggtgtattactgcccacgtctctttggtggcctaatgctaacggctgccttgcttggtttgtctaccacttatttcggtggaattggactgttcccattgtcatatgtttggtcagattcagggatcttccacaagaagaagtgtgagaagaagcgcattcgagtttacatggatgggtgctttgatctcatgcattatggccatgccaatgcgttgaggcaagctaaggctttgggagatgaattggtggttggggttgtaagtgatgaggagattattgccaataaaggtcctcctgttctgcctatggaagagaggctggcacttgttagtggattaaagtgggtggatcaagtaatagcaaatgccccctatgcaattactgagcaattcatgaacagtctgttcaatgagcataagattgactatataatacacggtgaa

SEQ ID NO: 16287 - DNA, 63 bp, Gossypium hirsutum
  Clone ID: LIB3829-016-Q1-K6-H3
acgtccctacttcagtccccaaaagcatcatcgccccacgcaccatcaaagcccaagcaaccg

SEQ ID NO: 16288 - DNA, 609 bp, Gossypium hirsutum
  Clone ID: LIB3829-016-Q1-K6-H4
tccgcttcgaaacacttctctaatttaccaatcacatcaagagagacaacatttggcagtttcctgtatcagcaacaaaggactttcatacagatgagaactgttctcaaagtagtggacaactcaggggcaaaaaagtaatgtgtatacaagcattgaaggggaagaaaggggcaagattgggagacaccataattgcatctgtaaaggaagccatgcctaatggaaaggtgaagaaaggaaaggtggtatatggtgtggttgtgcgtgctgccatgcagcggggtcgttgtgacgggagtgaggtcaagttcgatgacaatgcagttgttcttgttgacaagcaaggccaaccaatagggaccagagtttttgggccagttccgcatgagctgaggcagaaaaagcatgtcaagatcctcactttggcagggcacattgcctgaggcatggatccataatatttttcccccgaacacaagttttttttagcaatccaagcatttagatattttcatgttgtcccaatagcaggaaaaaaatgggaagagggaagaactaatctgttgtttctatcacaatcctgggcaatgattagtagatgtttgc

SEQ ID NO: 16289 - DNA, 604 bp, Gossypium hirsutum
  unsure (1)..(604): unsure at all n locations; Clone ID: LIB3829-016-Q1-K6-H5
tccgcggncgcgtgggttgccatttgccttaatcatcttcctctttctttaaaacctcttcctatttaatttccgactaaacttgcgctgaattccatggctactgcagaggttgtatcagctcagactgcaatccatgaggagaaacctgaagaagtggtcaaggttggagaaattgcaacagaagaggtaccggctgttgctcctgcagcagaacctgttgctgaagaaccaaaggaagcagtgcctgaagcagcatccggagaaccccaggctccagaaactgaagccacagttgaaactgaatcaaaggaggtggttaaagagcccaaggctgtgactgaggagccagaagttgagaaaaaagaagaagagactcctaaggaaacggtagcagagccagttgccgaggagtccaaggagtccaaggagacttctgagccaacagttgaagaaaccaaagaaagcacagagtctacagaagcagcagcagcagcagcagcagcagcagcagaagtaaaagcagaagccgaagccgccccagtggaagcacccaaagaggaagctgcaaaggaagaagagaaaccagctgaagctcaagctg

SEQ ID NO: 16290 - DNA, 574 bp, Gossypium hirsutum
  Clone ID: LIB3829-016-Q1-K6-H6
tgtgcccaatgctaaagctatgtacggttgctgacttgagcactgaaggaatgccgatcattgcattcaacctatctagtaaccgctgagcactacaatagaaaggcattaaatcacttcagtgagatgttgacgctagccaacctgccttgcagcatttcggacatgaataaagccatttacctttaatcatgattcagagtgatgatggtaagaacattttaaaccaaatttgatggctgatgacattgcaccatggatgaaagatttcaaggcaagaactgccgcaccgtatgtgaacgatgacacctattcccaaggagaacattcaaccactgacaagacgagcgttgctgacacctctgcaagacatggctctcaaatcatgtaaaaatgctccggtcgagtattatgccccttgtggaggacattgccaaaaatacgctccaatcttggatgcaagagctgatcatctatgaaaaagactccgatatgttaatcgcaaagcttgacgccacttgcaatgatatattgcatgataacttcgatgtcagaggttacccaactgtgctac

SEQ ID NO: 16291 - DNA, 599 bp, Gossypium hirsutum
  Clone ID: LIB3829-016-Q1-K6-H7
caattcccaaattcttagaaaccctaaatcttctctaattgtttatgcccattctgccctcccataaaaaccgttagagatattcctagggtttgcatttgcggtttggaggataagcttttagacaaagccaaatcttggatttgaggaatggcgactgcgacgggacaggcgaacgcgaagagaaagccggtgttcgtgaaagtggaggatttgaagcccggtacgagcgggcacactttgatcgtcaaagtggtggagatgaccccagtcaagacttccgccaggcccaacaggtcccgtgctctcctttctcgacctgtacctccggcccggatcgctgagtgcgtcgttggggacgagactggcaccatcatcttcaccgcacgcaacgaacaagttgatcttatgacaaaaggtgcaaccgtgattttacgtaatgctaagattgttatgttcaagcgaacaacaatgaggttagcagttgacaaatggggacggatcgaggtaaccgaacctgctaaattcgcagttaaagaagataataatctttctttagttgaatatgagcttgttactgttcctgaccagggcatgaa

SEQ ID NO: 16292 - DNA, 373 bp, Gossypium hirsutum
  Clone ID: LIB3829-016-Q1-K6-H8
aattcggccctctacacttccctacacagagaacgcgcacactgtcttgttaatcagcaataacctgctatagggagccagactacagttgcggctgcctcaccctggccctccgatgattcccttccctgtgcggcttcttccttattctgctgcatgccatgaccatcgccgacgtcggcgcgggtcgctccgacgccatttaaggacccaacaaaccctactgcgctaacatggtgacgctggtgccgacatcaatactaaaacgctcgtgatctggtgcttatcacgacccgcacctgctatcactggacgtactggaggtcgtacaccaaggaaaacgatggggaagagctcatggaactggctggcg

SEQ ID NO: 16293 - DNA, 581 bp, Gossypium hirsutum
  Clone ID: LIB3829-016-Q1-K6-H9
gggctctcttgtgctagacaggtacagtaggagtggaccgaatctgttattatttatgctggtattggttatgattcatatggtatgtgtggaatactgcagaaacctggttgatgtgtctgtgagaatgggaaccagtcagtggagcgtactaagctgaatttaaagcctcgctcacagactgtcgaacactgggagggctacattgagaaaaaagaatgtgttgttcggagacgctcacccacatagactggttctgaaggatagaggggttgatgacaccattcatgacctggacgcaacattctggtagggtcgtctagcatagtgcttcgaggagagaaaaagtacctgagtaagctgctcctatttcaattgaatgatgtgcgatttctggtgtcgatcagagagctggatgaaaatctgttagaaaccatggggtttacaatgacagagtggatgcacaaaggacgatccggactaatgaaaactggatgattgacatggaaattgagaggcagtcatctgatggagaggcagacatcacctgagacctggcgtatgcctgcggagcagcctaa

SEQ ID NO: 16294 - DNA, 461 bp, Gossypium hirsutum
  Clone ID: LIB3829-017-Q6-N6-A1
acaacaaatagagtccatgaccatgtattgcccatataagtgtatagttcttacattctgtcttaataaaaaccaagacaacagataactctaataaatagctgaggaagaagaagaaccggaacccagagtttagttcaagagagcgctgccctccttgacgagcacaaacacactcccagcatctccccttgaaatccgcagttcatcgtcaaggtatgttgtaagcaaccatgattcagcattgctgtttgataatgggatcttcaatggcggttggctggaaatggtctttgcaacagatgaagctgtgtcttgcacagaggtcagcaagcccttaataggagtgagatcaattttttgtcctagaaattccacattttctggtaacactatggagtctgtcagctggggagttccaattatgccttcttgaaacttgatctgcacacgtttggggc

SEQ ID NO: 16295 - DNA, 505 bp, Gossypium hirsutum
  Clone ID: LIB3829-017-Q6-N6-A10
gaaaaacaaagtcaccatatttaactggaattgacgggcgcacaaccccatgttcaaacaatgccggcgaaaaaaggaaaaggaaaagacaagatgaaatacaaaagagcttctccaattgaaattacaaaacagaatattattctccaagaaaaaccggcccaatgttatttaacagcttaaatttactcctctgccaatggaactgcttcagccagcttgcggtacttaagagcataaaacatctcaaggtaacgacgactctcacggcgttcaaggttggaaacatgcttccagaatccatacactccggtcagggtcaatagtctctccgagtaaatcttccatgtatacttctcctcgatacgtttcaagcctccttgggagatcttatcccagtgagatggatctttcttacacttttcaaagaaatcgaccagtatgtcagcagcttgatcaccatggtaaggatcaatgttgaaaccagatttcccatggacaataa

SEQ ID NO: 16296 - DNA, 328 bp, Gossypium hirsutum
  Clone ID: LIB3829-017-Q6-N6-A11
cactggataaaataaatagaattcatgtattttcgaactaattagactcggttttaactagataaacaaatcttataaaacataatcaagcttgaatttggccctccctaggctccatagatacaacaagtgcctggagcatatcaagctgtaattatggcaacattgttgtgcaaccctttgtcgtgaaagctgtaatatttaaagatacatcatcccgaatttcttaaataaaggccaacatttaacttgagcaaattagaagacatctaaaatataatgcactgccccgtactccatggcttccaaaaacggaaaagaagtaagc

SEQ ID NO: 16297 - DNA, 474 bp, Gossypium hirsutum
  Clone ID: LIB3829-017-Q6-N6-A12
ggactaacggagtctttttatatgaatttaaaagaagtatgtagaagatcttttaatttcactaaattgctgtatgatgggccgagttctatgggtcacaagcttcctctcatcaaagagttattcgggctttgggtgaataaaagagtaacgagcaggttcggcagtcacagacaacttaaatagggcattaatggataaatgggttaccatataacccacccgtatggatccgcactcgcatgtttgccccctcgaattatttcccaagagatgcagacactaaccgtcatgaaacaatttcatcctagatctgtctgcatttaacatcagcaacaagatggcggatgtgtggggcataccatttcactttctccacatgatcgatcgtaacttcccaacgatggccctcggatcttgcaatttcagatatcgattttgagacatggttagcccacaatttcacctcggggt

SEQ ID NO: 16298 - DNA, 561 bp, Gossypium hirsutum
  Clone ID: LIB3829-017-Q6-N6-A2
gtattcaattattttaacttcatttaaaaacatgagtattccaattacaaactcatttgtacccaataaccagcgcagttctaaagtaaaatctcctaaaccaatacttgtaagcaagtataacagtataaccggaccccgactcttaatatgaagcaatcactgttaaaataccggaaaacaataacaatggcgtttatgacatgaagctattttaggtaagatcatcttcctccagctctttagctttcagtttttccttcactcgaagtaaaagggttgtcttccatgaatccaatggggtcatgctgtcaaattccttgacaacatctgtaaacttcgtgacatcttcctcgtccagagcagaagcaatgtcagctaataacctatactctcgtgttccagaaaaagttggatccagatcctgatatcgctctaatgcattggtgatagcaacgacatcgcctttgcagagttgacaaaggccagcattaagaagatgccctttaactccatactttagcaagttattggtaagtgactgtcgtgcaatctcttcgt

SEQ ID NO: 16299 - DNA, 491 bp, Gossypium hirsutum
  Clone ID: LIB3829-017-Q6-N6-A3
aacaagaagtaatcttgtaacatttattcataactgagaataaacataaagtacgtaaaatacagaaataagacagagttgaaagtagaaactactagtacaataacattcaaagcaactgcttgtcccataatgatattacaggcagctagaaacttggtacttgggggtattcatattacacaaccagagttcatgcatacaacacaaatattgattctaaatacctggcttcattatttctaggctgcaaaccatcagagagaggccagttatggagaggtatacaaaggtgagaacttcattactatgatttgggttcaatcttaatatttgaaattcccaactccgagcttctgtacttcaaccttgagagacttgaggtacctaacagctccatcgagaacagcaacagtatccatctcatcagcacccggaacgattccccttaaaaccttcaccattttcttcattttcagtcgcttaatttc

SEQ ID NO: 16300 - DNA, 522 bp, Gossypium hirsutum
  unsure (1)..(522): unsure at all n locations; Clone ID: LIB3829-017-Q6-N6-A4
gaaaaaacttggttccataattttactttaaacaatctcaaaggatatatacacacacgtatatatgtatatatctagcttccctttccttccccccttaattaccaaatgttttattcatgaaatggatctcacggtacccaacaaacaaaggttttcaatccttctcaagttcttcatttaagaggagtttttcagcacccattccaccaaagttgagacgccaaagccggttgctacgcgcttcttttcattccagacagggccagccaagtcaatgtgcatccattgtactttttcatcaacgaactgtttcaagaacagagcagctgtgatagcaccacctggacgaccaccggtatttaccatatcagcaactcctgatttcatagactcccaatagctttcctctagtggcatcctccaaaatttctcaccactgatctctgaagcttcgaatacctnctttgcaagttcatcactagggtgggaagacgcctgcaatcgacgggccaagagcaa

SEQ ID NO: 16301 - DNA, 460 bp, Gossypium hirsutum
  Clone ID: LIB3829-017-Q6-N6-A5
aagggggaagaaatagttcataaaataaatccctcccacacaatctatttagttttaaacatgctacagttctaactggtgaagagaaaatttattctctcaatcatactttaaaaacaggaagaaatgataaaacctacaacacagactttagacctttttttttttcaccctcacactcacaatcacaccatttggttttgagtttctacattatttcgagcaaaatacgacatttacaggttacaacaatcaataagagttttggacctccaaataaactgaaagatatatatatttactttttttgagcttggatctttattttcaacaacttgcactcctccaaaggtggactccactgggatttcacaagacaaggagatccttcacatcaatttcaaaataacccaacccaagcaaagctgttattaacaaaaacttgtttaattatcactta

SEQ ID NO: 16302 - DNA, 540 bp, Gossypium hirsutum
  Clone ID: LIB3829-017-Q6-N6-A6
tttttttttttttttttttttttttttttttttttttttttttttttttttttttttttttttttttttttttattttttttttatttaaattttttaatttttttttttttttaattttttaatttttaaaaaattaaagaagggggggaaagaaaaaaaaaaaaaaaaaaaaaatagggttttttaattttccatggggagggggggaaggggggacaaaaaaaaaaaaaaaaaaaaaaaaaaaaaggaaaaaaaaaaagggaaaaaaacccgaccgggcaaaaaagaaaggcaaaagaaatttgaaaaaaagaaaaaaaaaaaaaatatttaaccaccgagggaaagaaaaaaaaaaaaaaaaaaggactggggggtaaggagggaaggaatttccccaaaaaaaagaaaaaaaaaaaatagggaaaaaaaaaaaaaacgcccggtttttgggcggggtgggaatgaaaaaaaaagaaaaaaaacatggggttaaagaacccgggggggaaaaaaaaagccaaaaagggaggggggg

SEQ ID NO: 16303 - DNA, 507 bp, Gossypium hirsutum
  unsure (1)..(507): unsure at all n locations; Clone ID: LIB3829-017-Q6-N6-A7
cgaacccaaagaaaagtgatttgaatctaacaatctgcttgaagacaggcaaaaacctgagttttcctgtagtttatttagaacaaaacatgaactgcaatggtaagaactagaacaaagaaaatgaatatgggttttgatcatatcatcttacattagtcttactttcttcaagattgttgctaaatgagcagtcaaagcatctagaaactatgatgcatatagcttggccaggtcttcagaaaaagctcttctaatggcctctctcttgatcttgagagctgcagtcacaagccctgattctggagtccatggactagaaatcaatttgatttttgcaggaatctcaaatttctccaatcgtgacttcttggctgtctgagcaagagaggaatgtacttccttgatagtttcttctttctcacacaagtctgcaaaatcagtaaatgtaatgccttgctttgaagcccaatcttncaccattttgttgggaagccaccacgagag

SEQ ID NO: 16304 - DNA, 511 bp, Gossypium hirsutum
  Clone ID: LIB3829-017-Q6-N6-A8
aacaacgcaaacttgaactggtttttcataaatagaagacaaaacatctgataaaattgttggatttccaaatggtttgctcctactaaacacataatttagtaaagggaaaaaatgcctagcatatttaagaaacaccgaacagttcagcattgcaacaacttcggaaaaagaaaacgaaattctgaggcatattaatccacagttcactatcaaacaaatataaatggcccagaaaaatagctatgattttaccaaagaaaccatcctccggtcacctagtccttgtgctgctgaacaacttcgacggcctcatgttgttcaccataatccttcacaactacgcaggaacaaccaactacctttcgtgctttaccctcagagtctatcttacacaaaccagcccactcgccaagtgattttgcgctcggggcacgtagcactttaacattatgatcagcacaaagtgccttgaccagcttaacataatccggctggtcacagtcatcag

SEQ ID NO: 16305 - DNA, 548 bp, Gossypium hirsutum
  Clone ID: LIB3829-017-Q6-N6-A9
acactaatcatcgacatcgatacacatatatatgtatgtcaagacaaagcagacaaaaggcatgagttcccaacaaattatcctttctcatgctgttttcttttttaaagaaaagaaccatagtgcatggatctatgtccatattcacatataaccaaaagcatagttaaattaattgtacccattttcatgcagcaaagcatcccaaatggcatgagtaaataggttccagagtaaggtctagttcattcctcctcatttctgttgtttcttcctggtatgtgccactgcaaaaattgtaaactataaacaatcaaatcttttaaccaagcttttgccacttcattatagacaacagaaaacgaaagcttatgtggatccatcttctttggcatacgttttcaaaattattcggttttcagttgataggattttatttcttgcatcacaagtaacatatgcctttcatgcatctctagatatcattaacgatgaatgccaatgaggggtgctacccgatattcaaacagggaggaagctgtggcagc

SEQ ID NO: 16306 - DNA, 574 bp, Gossypium hirsutum
  Clone ID: LIB3829-017-Q6-N6-B10
agagcaatagcaatttgtgaggtaaattcagggaaagtccgaaatgaggatcaatgcctcaaccaccgcaaaaaaaacacatagttaaatttggcttattacatcgggaaattttcaacagacattaggttccaaggaaagatctcaactacaaaaattaaagtttcccagaaggttgtttctgtttcacctttaattcctgcttttcaacttctaattctttttcaccatcgcggccttgatgatatcaacaaactcgggctttagggaagctccaccaaccaaaaagccatcaacatcgggttgtgcggccaattccttgcagtttgctccatttacggaacctccatatataattctagttgatgcagcaatgtcaccgccaacattctcatgaagccatttcctcaactcgcaatgaacttcctgagcctgagcaggggttgcaactttccctgttccaatggcccaaacaggttcataagccaaaacaacattgtcccaatttgttacttttccagcaattgctttgggttgtgcagcaacaacagccatggtagagccagattctcgc

SEQ ID NO: 16307 - DNA, 538 bp, Gossypium hirsutum
  Clone ID: LIB3829-017-Q6-N6-B11
aactcgcaagtcccaagtttgtatttgaaaggccattcctggttcaaacaaggaagaaatatcctagttagcgcagcttatgttaaacaaacttctctcatctgcccatccggtccaaaccattcaacactttttttccctctcccttctagacagtacagtcaattagactattatttctagtttagacacaactaatatctattattatattatttacaatgttacaagtatccgggtcttgtttcatttacacttcggccaccacatgccgacagcttccccgtgctcagatttggcaatgaagcctgtgcctgcatctcggcaagctctctcacgcgtaacaaaattggtgcgggaatcggcatcgaaggatgcttccgtgaatttgcccctttgtccgtaggtgtctgggcaaagctagctttcagcagattccgccatttgtccttgagatcaacagaagttctatacgaataggatgcaaaggcaagccttttaatcttagaccatcggccagctccatacttggacacac

SEQ ID NO: 16308 - DNA, 523 bp, Gossypium hirsutum
  Clone ID: LIB3829-017-Q6-N6-B2
ctcaagcggggcttcattggtttaattagaaaagcatataatatttcaccatagctttggagatcagcatttccacaaaagaattacaagaacccagttaccccttgcttccaatactactactacacaaaattatatgtatagattgatagattgatatgcgtaccatgcgtgtaaagaaccccctgtaggcttttacagatgatctgcgcacgaagtcctcctggttcctgaccttagcccgtcaaggtagagcttcccattgaactcttctaatgcctcattttccagggatccactgtaatatttttggtctgcacaaacccggccactggggttcccaatgtcgtatcttggcaatgagtaattcgagtccataagcatgtcaccttccaatatgcgtagcacctgtgacatgcgaggcctagaatgaggatcctgccttatgcataatgatgcggcatggagcatacaatagacttcatgctcggaatagcaatcctccaatcttgggtccaccaat

SEQ ID NO: 16309 - DNA, 518 bp, Gossypium hirsutum
  Clone ID: LIB3829-017-Q6-N6-B3
acttcctacacgttaaactgatattacagaatgtgtcaagagacattattgagaacttgattatttggcctaaatgtttttcatcaaatctttgatacattgcagctcagagatcttcattgccttggccttgctcgttaactcggttttcatcaactatgccatcttctggacctccgtaattaacccacggtagcagcgactcaaacaaaacggccaatggattgcgattagcaacatcacgtagtgctggagcctgaccaccagcaggaggattggcaacctgaccaccaagatgagcggggtccctcatgtcaaccataaagttctgtagattatctgggggaagagtttgaaccgtgtcggaaaagtcctgaaccaacaaatgaccgtactcgtttttgttggatgggaatgcttcttttctcacacacgtccaatctttagcatcgtttttattatgctccagagtttgaataacgtgggaggcaccatctcgaagtaacttttgtagatcg

SEQ ID NO: 16310 - DNA, 539 bp, Gossypium hirsutum
  Clone ID: LIB3829-017-Q6-N6-B5
aaacaaatgcactatgatttattattattacttgtaaaagacaacatgcaaactgcctcttctaataaaaacatacaagcagaaacactaaatttaagcgacctgcttgggagttgggacccaggaaccacccattacagagaacagattgaccatgaaaaatgtccccccccccccaattcctgcttgaaccttctctaaactctctccctgccatatgccaattgcatgttagtttagccaataggcaagctatcattggtgggtcatttccatgccccagtcccaagcctcatccaccttaatactatcacgtccttattcaactagaatagaaactaattgatttcaacatgcaaacttagctaacagtaagcgcactacacaagcttccattgactccccatcttacaagcttattttactcggtagtagacttctcagcttgagcttcagctggttcctcttcttcctttgcagcttactctttgggtgcttccactggggcgggttcggcttcggcttctgcttttacttct

SEQ ID NO: 16311 - DNA, 563 bp, Gossypium hirsutum
  Clone ID: LIB3829-017-Q6-N6-B7
aaaaaaaaagaatcatgcaggtgttatattatacaaagtatgataggaaccaatacactctcaaagtacatgatattccctttcgtctatggggacaaaatatcttcagtctggaacaataaaacggaatcgtacagatctcatcatgctaatgctattcaatgaaatgataactagtggcaggttagcacatgggaagttctgaaaaactcttaatggatgcaccagaactatcctaacataaaaatccaactgcaggaccataccagttctccaacaagggtagcccaccgggccccgaggtataagtagtagggactcttcaattcatggtggctgcaaatagtcccgaaatatcatcaggtggttcattcaaattcttcaattaggagtccaaagtagccgcctgttcattgcaggtggtgctaaacctggaatatctcgaatgtccttgttgtttggattcaccagcttcacgattatgatggctatgacaccaatgacaataagaaacaacaaggccataatgcacttatcagtagcaacctgcctaccaatttctt

SEQ ID NO: 16312 - DNA, 474 bp, Gossypium hirsutum
  Clone ID: LIB3829-017-Q6-N6-B8
cacaaaaagcttagtccctgcatgccaatgttctctacaacgaaatgtacaacgagttttatataaatggcttgttccaaaatccagcaagcttcatagcatgaaagaattacagagctggggtatgctacaaaaacatatggaggcagttgaagctccgcttaggttagactttggatcaggaaacaaacaatgagctaaaacggggtagtccttgacatcagaaacacctcctggagaaatccgaaatagggcttctagcctcaggcaagcaaggggaacttattactttacaaatacgctactctgctcttcccttacggaaagccaatcttgttgtggaagcattagccctgatgttcccaccaataagcttgatttgaagaccgggaaaaatagctgaaccatccacttgagcaactacctggtttgtgaatacaacacccacaccaaactcgtctgccaacttctgaa

SEQ ID NO: 16313 - DNA, 556 bp, Gossypium hirsutum
  Clone ID: LIB3829-017-Q6-N6-B9
actctatacaaatgaagacctttcccattggctaaaatttaaaatatatggtatttttttacatgcccaagacagttataaatgtgtataatacaggagaagcattattggtcttacagaaaaaaaaaaaatagttgtcaacaacactgctgtcaactggtgatataatgtgtcttgtctcttaatttgtctgaaaatagaagtctccaacaatttctagtatgcttgctctttaagttgttcctctgtcacaaagaaagcatgaaatccataaggaaccctgtagggtaattcaacaactgcaacaggatctgctgacatcgtttttgcatcaatcacattcactgctgattttccagtattttcatcatgtgcaaagaatatcaagtagccatcgtcttcttcacaagtggtaccaggctcacgaggcacaaaaacagcttctgaaccgaatctaccaggacccaagtcaaataccccaacaacatttcccccaacttcaatcttttcttttcctgcctctggttccgtgtgcagatcaaatttaacaattccc

SEQ ID NO: 16314 - DNA, 134 bp, Gossypium hirsutum
  unsure (1)..(134): unsure at all n locations; Clone ID: LIB3829-017-Q6-N6-C1
gggaaaatgcatctctaatccattggcaataataataggaattctagaaggcttaccctgaaccaaaccattaagagtacaaggtagagcaaacaaaacaccaccagnattaggagnaaaaattttggnaaaaa

SEQ ID NO: 16315 - DNA, 108 bp, Gossypium hirsutum
  Clone ID: LIB3829-017-Q6-N6-C10
gatcaaaataatggctagattacactagtagacaactctgtttcaaaacataagaaaaaaaaaaagggcaagctaacttgaagcaacaagtatcgcaaaactctggga

SEQ ID NO: 16316 - DNA, 498 bp, Gossypium hirsutum
  Clone ID: LIB3829-017-Q6-N6-C11
ggcattaacaaagtctatttcagttctttctcgcagattacagaataaatttacacatgttttactgagatcaagaaaggagcagaaagggatttggcaatggagcttttagccggggggatagttccatggaacaaatataggcactttcatctaatggaacttgaggttagtcaagacattgttgttgaaagggtcagccaagtgatccaacaggttctggtatggtcctacacctgtcacgagcccttgtatgaagtaacccaagattgccaacattgccaatctcccattcttcacttctttcagcttcaaatccttcaatgacttctcatctttcccaaaaccaagtgggttaaacagtggtcctccagggtatgccggctcaccagaccctccaaggtacttctcgaaccccaagaaatattgtttccccatcgaacctggttttggcccagtcttggaaccttctgtgctctgcaaaatccatgagtgcca

SEQ ID NO: 16317 - DNA, 358 bp, Gossypium hirsutum
  Clone ID: LIB3829-017-Q6-N6-C12
cttaaacaagaagttttgatttggatataggtataataaaagaacatgaaccagcggggtagcatttctaagtaatgaaatctgttaaaaagtattgtctgcacaaggtaaggtttcctatataccattagccctaaataaatccttttgtaaacattgttccttttgtttcgattttttcatcactaattttctctaagtcagtttggctgtactgttgcttccggaatccctcgaagcagtccaatgacttcaactatgtcatcaacataatattttgccatacttggtttttgcccaacagtgcaagcaaatatctttgctatggccggtaaggtagggttggcaaatgagcgag

SEQ ID NO: 16318 - DNA, 405 bp, Gossypium hirsutum
  Clone ID: LIB3829-017-Q6-N6-C2
aaagccacccaacagattagaattttaattccattatgggaaaaacaccaactatagaaaccctacaacattcatccaagcttgagattgatccaagcaaagaaggtcacatcaatcaaaagtctctttcaaataaactaaaaaccatgtgaggccaaaaagcaaaagtaaggcacatttaagaatctgcaatggtgacttctacctcaacaccgggttcaatggtgatagatgtgatctgcttcaccacgtcaggggagctgaataggtcaataactcgcttgtgaacacggagctcaaaccgatcccatgtgtttgttccttcaccacagggagacttcctggtagtgatgggaagaaccttggtgggcattcttactggtcccttaaccctcagtctcttat

SEQ ID NO: 16319 - DNA, 547 bp, Gossypium hirsutum
  Clone ID: LIB3829-017-Q6-N6-C3
aagaaaatgaatgaacttcacttctctcgagtcatgtatgcacgtacagcttccaaattatccgaggttgagtctcacactgaagaatcatcaaaaagtgaagtaaacaatgaggcaaccaggaatagtgcactgccacatgaggtctctctagcatccatgtctgatgttggcagcgatgataaagccagctgcgcagaatcctgggcttcagctttaatttcagaactggagcaatgcaggaatagacagttgagggagtcgccattacgtaaaactgttggatcttcagaaataaatctgatggatgactttgtcgaaatggaaaagttagctttagtttctgctgatcaattttctggaaattctcatgtttcttcggatgatgctaatgggacccttggacctatgcaaactgggacaagtggaagttccttcgaggtaatatgtaaggagatagtccctgttcctgacagtcagccagacagtagcatgttgaacaatgaaatgaagtctgaaagcccattgcttagcaaagagtgtggct

SEQ ID NO: 16320 - DNA, 69 bp, Gossypium hirsutum
  Clone ID: LIB3829-017-Q6-N6-C4
gcccccgccggagccgggacccccaggcgggccgccccccccggccccccccccccccccccccccccc

SEQ ID NO: 16321 - DNA, 524 bp, Gossypium hirsutum
  unsure (1)..(524): unsure at all n locations; Clone ID: LIB3829-017-Q6-N6-C5
gtggacttaactaattgcctatttattaatggatagcagcagtttttcaaggtacacaaccttaaatactagttacagataacatgtagagtgcatcctcatcattgtaactagtaacaattaccaagaaccagcatagatatatgattattgatgtaggcaaaatgaaacggtgagacttattaggttctattttttgcattagctgcagaagggtaagaagctagttgggactaaggttgcattcagcaaccttttcccaggatttgagagttttgtcctcagtatctgttttgtacaatgcaaggcgacttatctggaagctcaggctactgatgctttcatccagcatattagctttttcttgagctttcttcttctcttcttctgtgaggtcagcataaaggaggcttaagtgtggcatgtatggtgttgagctcttgtaaccaaaatggctactacaatgagcactagtttccgccacctcangagtgggatgaagcaacaaaagatgcactgataaa

SEQ ID NO: 16322 - DNA, 542 bp, Gossypium hirsutum
  Clone ID: LIB3829-017-Q6-N6-C6
aggttcactgctatagatatcgtctatcattttcatcaaataggaggaagatgttgatattacctcgttttaagaaaaatcacaaagaaacagcccacacacactggctcctccacttattgcgttccagctaaacacagagtcccagtgttcatcatgcttctccctaagccctgtggcttgtttcttggattacaaggcactgggaggatagccaatttagagcgtcacttctctaccagaaacccaactgaatggaacactgggtgattccttgggcctcaattgagctctctcctagtaactttctaagtctcggtgcaaggccacacacaaattcctgagcttcacggacctcatgtgaaaggacacatgagttccttcaacttccatcggtcaaccagatattcaactatatgagcatagtcccgggcagaggaaaccccaattctttgtgcaacagacgagtactggtccaaaaggttttcgtcacggccatcatacatgaagtgggctggcatggagattttcttactcatcat

SEQ ID NO: 16323 - DNA, 576 bp, Gossypium hirsutum
  Clone ID: LIB3829-017-Q6-N6-C7
aataggaaattggagcaacttcaaagttgcttttaacatttcattgataaaaacactatgctatatgttgtttttcacttttttcctgaaattagtacacagtgggaggggaagaccttgatctatcattatagtgtttgtaccacgaatctggcagggccacaggcaagtcagccgattcccatgctgcacacaacagcacagctgtaatcaaagaaccatcagctttttgcactctttcatggggaaggtttccaatcaaattgataattattaaaaccattaactgctccaagtccattcagtagctggttccccatatcctgttgttggtgattcattagctgatcccgagccatctgtgccattcccatccttccattcatgacagggttatttcccattgtggctctgattccattcaccatagcagactgccctagtccaccactcattgaaccaaaccccacaccaccaataactgaattattgctgatggttccattagcgaccaaagtgttgccaccgctgagaaccatgttgttactcggtggcagcatttcatttacgctcttc

SEQ ID NO: 16324 - DNA, 410 bp, Gossypium hirsutum
  Clone ID: LIB3829-017-Q6-N6-C8
gctgaactggaattttccttttctactgttgaaagcatcttttattacatatctatatatttcccagcagggaggcatttccctcgtctttttttcttcttcgggtgcttgatatgaaagtcaaatggaaacatcctcaaatatgagggaaaaaaaattacatataaatttaatttgatgcgaataaggcagttaactgactgatcaatgagcatatacatgaaataaatcctttgccttgggagttttaacatcatatcatcttctcgaatttatcaagcttcttcaccctttgcattgacctaagaaaaagtgtcaagaaaactcctgctccaacgaatgatccgtttgcaataatttggcttccctgactgctgaaggtgacacctaggtttaccagggtccctcct

SEQ ID NO: 16325 - DNA, 511 bp, Gossypium hirsutum
  Clone ID: LIB3829-017-Q6-N6-C9
cacaagcccactagtgtttattaaagagattaaattgaagcaccaaacacgggaggaggaacaaacaagagcggtttgatatgattgaatatcaattttcagagctataagatgtctcccctgctgaaaaaaagccatctttttgaagacgcttcatttcctcatatgcccattcaaggccagggcagtaatggagcgggggattaaatctacaatcattgatgtcatctggcaaaaatgccccattctttataaggaacttcactgcttccctttttcgttctttagctgctgggggaaggggcgtccacccacaagcacctttagttcttgcatcaatattagcaccacgttcaagcagttcatccataacttcaagggggccaccctcagcagcaagatggagtggggtgacaccttgggatttggggccccatgcagccacatttacatccacaccttcgttgagcagttgcttgacctgaatgaggtcacctttacggcctccgat

SEQ ID NO: 16326 - DNA, 551 bp, Gossypium hirsutum
  Clone ID: LIB3829-017-Q6-N6-D1
actaatcaacagatcaacattagaatttattatttttttaactttcaagcagccttgttttgattgcaattgttaattataagttacaaaggtgaaatctacaaccacataaatgaacctaagagaaaatactactacttgccctctcctacaatacattacattacatttccataggaagaaaaaacgctacataagattgagaaccctatgctgaaacatctaggagactgattattatctcctgattgcattaaacatgtaggagatgcttaattgctgtgcaattgatcttatatattattcatgtacatataccgtgttgcagccagtgctgccgccgcctttttgcagcgccgcggctgattgatttccattggataacagctcgtaccttcaaccacctgtttttgggacacacttctcttgtctcttcgatgcttcggtcatttacattgcagctcgggaaagaagacaagaagcttatagatgatgtttcatagtctcggggtgaaatgaatccactgccttgtgcccatgctggagtagct

SEQ ID NO: 16327 - DNA, 497 bp, Gossypium hirsutum
  Clone ID: LIB3829-017-Q6-N6-D10
aggaaactcggactttataaaatgcataaacaaaacaaacacatcaacccagcgtctattagagattagtttgcagagccaaaacagtgggtcaaaattgtataagctttagaatttagatgaaagcaaaaagagtgtcttgagattcacccaaagatggatctttcccccctctaaagtaattgcttgaaacatctagatgttgctcttttgatacaggggatcaatttctttctcaatgttcaaatctcgtgggccttgaatccatcctccatcaatggaatccataggtccattcagcccatcatccaagaaatccccaacccgtttcactttaacctcccttggcatcactgggtattttcctgagaagcaagcataacagaaatttggagactcactgcccaacatcttcttcaagctttcgaatggcagaaatgccagtgaatcacatccaatgaactcccttatcttctccacactcattctattcgata

SEQ ID NO: 16328 - DNA, 534 bp, Gossypium hirsutum
  Clone ID: LIB3829-017-Q6-N6-D11
aataaaacattacttcaaaagaagcaatgatgatgtttgcattcaccgaaaaagtcagcagttacgtttcaacagcaataagcttgagctattaacgaccgatgcaactcaccaaaagccaactcttaaatatacagaaaagaaaagggttaacccttggatgcttgggaagccattcaaagcagcattgaagtgataccaggggagaaatgggatcaaggacaataaagaaaatcataacattctccacctcataacctgaaaacaatcgcagtttcatgttgtacttctcgaataacaaagatcgaacccgtctaaaacttgctggttcgaatggactagttttaacatggattgatggatgataacatagaagtcttggctacagcagttgcagttaagaggtcaaaatgtttaccctacaaccttgtacactgttggtttaagtcgtgtctggctaagacagcagttttcacctcacgttccattccattctattagatccgatctcattaaggtatagaacattatact

SEQ ID NO: 16329 - DNA, 548 bp, Gossypium hirsutum
  Clone ID: LIB3829-017-Q6-N6-D12
acaaaaatcaacaacttatactaatttaagcgtgccctccgaagttccatttgtctccgagaggatgatgatggatataggcaaagaatgcaaaatcaaagttattgccaaagcccttgcttactccatcatgtattttacaggttctattacacatccccgttaccccaaaaaacgaaaataaggtgaaatgacgatagcttatggtctattagtgctgcacatttaacatatcttgatcagcttcgaccatgtagagatttggttgcttttgaggccaaagctaatgccttggctcgtgtacttgtcatcatccactccctctctgcacggcgctgatgctgtcttgcatttttcgcacgctttggagctaaacgtgtgtctctttccacaaaggcaagtctaaacttttctgctatggataactcattggcacttgaaagtgaaggagacattgcctttggcatagatcgacaaatagaccatgttttgggatcaatgtcctcaacaatcggatcatccaaagcaacatctggaaatgcttccct

SEQ ID NO: 16330 - DNA, 470 bp, Gossypium hirsutum
  Clone ID: LIB3829-017-Q6-N6-D2
aatatatatactcaaatcaattcggaaatggaagggaaataataaaaatacaaattttcatgaaacccttaaactaccctttctttagtctttagtatattagcagccaaaaaatgccttttttgctcccaccaaaaaggaaaaaaataatgggggcaaactacaaaatctttatcacatccctccaaaaaaaaacactaaaatagcacatttttccaaattgataaaaactacggttttttttcctaaaaataaccttaaataaaaaacaaaccatgcttttaaggcttaatagctgcccattgggggcataccaaaagggggcatcaaaggggggattcccattcctcccatgggggggggggggggagaaaaacctcctcccattccaggcattggtggtgcaggtaaggctagaggtaacacctgagcatacatgtatgtgtgggcaaacacttcctttttttttt

SEQ ID NO: 16331 - DNA, 543 bp, Gossypium hirsutum
  Clone ID: LIB3829-017-Q6-N6-D3
catggatgagacttgagagtgcattggctttatatatttatatataatgtaacacttgataagataattaagaaacagaaacccataagatcccaactatgagagctcttgctacatctagctaccaaacttagttttactttgctactatcagtcacatgtatttcatcctatatgtacaacttttgagcaccactctatcaatggacaaaggctctgcaggaaagtcacaagccgtgattttctccggcccttgatctggtagttggtcacatggccgaggacttactccactcgtgatcccctcgacgtctgtgcaagtccatggtaccttcttagccttagctgccattccaatcgtgacattggatatgcagatttgagtaaaaggatcaccttcaatcccttccaacctggcagccatcgacacattatccgccatgatgtctctgtaattaatcccctgaatcaccggcaatgcattgggatcatagtgattatcagcatgtgctttatagttccctgtcatccaaaacacccatt

SEQ ID NO: 16332 - DNA, 464 bp, Gossypium hirsutum
  Clone ID: LIB3829-017-Q6-N6-D4
ccataagctgatatgcatttgggaaaactttgttacagaagaaacagcgcagtccaccatgatagaagctcatttcttacagttaaatagtacaagaatagtgatctagggggggggagaccaaagtggaatccttgttaattcgaggtcttggattggatctttgcgaaatccagggttcttttgccttgcaacttgttggttacgtaatgtttactgtactctccatgattgtatcttctgtatctgcatggattcttctcatccaccagttctgccattggaccaagttctgtgtcatagcttggagcatagaaagtgacgattgaaaggcggtctctctctttgtgagttactgctctatgctccacactcttgtattttccatttgtaagaacttctagagtgtcaccgatgttgatggctagtgcatttggaataggctgaacaggcacccacgtttg

SEQ ID NO: 16333 - DNA, 359 bp, Gossypium hirsutum
  unsure (1)..(359): unsure at all n locations; Clone ID: LIB3829-017-Q6-N6-D5
atccattaaaatagtcgagtcactaaactcattttcctatatccctcaaaaaataaggggttgaactcacaaagacttaaaattttacaagatgaaaacctccctaacataaacagcagtttgggtaggcaaacctgagccctaccttcggaaagagcctgcctttctttgggtgataggaaaggaccaaattgaaggagctgggcgcggccacactttgcaggcccaccgggaaagagcgttctaaaacatgctaacacccggtccagcaccttatcacccttggntgaataatgagtagtatgctgccttatttaagactacgattgtgatcctgggatatgctgacttgccctact

SEQ ID NO: 16334 - DNA, 556 bp, Gossypium hirsutum
  Clone ID: LIB3829-017-Q6-N6-D6
gaaaaaaaaagagaactgtatataaataagacaacaaatgagtgtacgataggagctggtatttacattgaaaaaattacaaaataacatcatcagtttgccccaaaatgtgattctacccagattcgcccctcatcactctaatcaatagaacattttaatagcatccaaaagatgaataaaaaaaaggctgccaagacaaaaaaggcattgtaataagcaaccaaaacaactgttgaaaatgcttcttgtcatttgtaacacgagcagtaacaaggaaaaatcaaccgacttgaataagatgaagcaaattggcattgatgagatattacttctcatgtgccaacattgggagttggagttgatataggagcaccaagtgaattctccattggtcacatgctgagcatttatccaatttcacactgttttccaaggtgcaaaacttgcaggaccaaaatttgtacttggtaccaatgtctctgggcctttccatgcagcaaagcttgcatattggggctaatggtggattcaataaagtgcatgattggcactc

SEQ ID NO: 16335 - DNA, 516 bp, Gossypium hirsutum
  unsure (1)..(516): unsure at all n locations; Clone ID: LIB3829-017-Q6-N6-D7
gccaattaatccaatagccaaagaaaagggtttattaaaaaacttcaacactggaatatatatatagtctttgttcatcatcacaaagtgaagaaacagagataatatattcattagttccatccaagatgtgctaatttttgttctaatgcatttcagcagcagcgccagcggcccttattttggcaataacaaacttaccaaactccgcaagcttgtcagtatcaggcataacatccttcacagcggcatgggaacagaacctgtccgcccattttaccagaccaggcgtcttcccctcgtccagcagcttcatcgcattgaacttctccgtcactctaagccatcccaagaagctcccaaaagctatatcaaggtacccaacttcatccccaccaaagtaacccttccctttgctgcacttgtcgtatgcttcttccatcaaagccaaccctgcttccacttgcgctattgctgctntctttgcttcctctcctttagcgactcctatacttt

SEQ ID NO: 16336 - DNA, 467 bp, Gossypium hirsutum
  Clone ID: LIB3829-017-Q6-N6-D8
atgggctcaaacattacctaattacatcaaggacattggcaacttagttcaaatcaaactaaacttagttcaaatcaaactaaggaacaaaacaaacacttggaggaaccaaaatgaatcagccgcctgggcttttgtcgcaactgcatgggtcggcagcttgggctgctcctagggctgcatggaagccagcttcaacaactttaagcacccttttgcgggggttcaaggattacgggaattccctggtctgggtgaagggggaaaataggccctggggaggggacataagccggggagaggggaaaggagtaacgttttaaaaaaaaggagagaggaattttgggttttgggggtggaaagggcataccaacacaaaaacgggggcccaatccaaaggggaaaaaagcagcccccttgtaattgggagcttcgggaatcccatcagggaattttttcgggttaaa

SEQ ID NO: 16337 - DNA, 548 bp, Gossypium hirsutum
  Clone ID: LIB3829-017-Q6-N6-D9
gctgttaattcattttttattctaattaaggtgaccaaacaacatacaagtaagattgcatgacgcactgaaaagctagaaatcagccgagcaaagtccttacaagaaacgcttccatccgaatacaaacactagtaattggaatacaggaagcattcaatctgagaaagatgtgcatctcccatctacaacctgctaccatttacatgccagccggtttgccagttaggcataaagctgctctggtaggttgagacttacaatggcttgcaaaatgaaaacaaggaacgatggcactaatccatggcacatcaatgaatctccttccggtggcatcattcacaagccggtttggtgtcaaagctgcttagacagattgcaaaggcttggaacgcagaaagagggtattgataatccatggtgaagatgtccttaccaattttcccaaactgtaagattaccttctcctgatcttcaggtgatacattatgttctggctcaacagctgctacaagctggaaattcttaacagaggccaccgtcacacg

SEQ ID NO: 16338 - DNA, 514 bp, Gossypium hirsutum
  Clone ID: LIB3829-017-Q6-N6-E1
ggagggtgaaataattcattatgctaaattaaatttattttaaatgttttggtatgaattttaagttcagttgcgtgtaaacataaaaagcaatcccttatatagatatgttaagcataaattaaattatctacaatcaacatcgaaccagaaatagagacaagttcgagcataaatgacacgaacttgctgtagtgctagatctccactcgtcaaaacagcctttgcacctccttcaatccgagtgtgcgatacagaaatgctatcaccatcactcttcaggttggagggaaacaccccacttccggccgtactcacgatcgggcatgacagatagtccaacgggtttgattcacactgaagtatgcattcatctataattagccttccactcctatgaagcaagcagcaacctagctccgccttcaccgttaagtttgtcagcttgcaggttgatagaaactccaatgcactgctccaccaaaatgaacagcacaaacgtgccaggtgtttc

SEQ ID NO: 16339 - DNA, 522 bp, Gossypium hirsutum
  unsure (1)..(522): unsure at all n locations; Clone ID: LIB3829-017-Q6-N6-E10
aaacgatgctagagttacggattttattgatcctagtaacagaatatggaaggaggaggtaatcaaatctacctttctggaggatgttgccgagaagattctgagtatcccgttgtcagagacacctcatgaagatttccaagtatggcgtgctgaggcgtcgggcgattacacagtgcgtagtgcctataaactattacaaggtaatgcagataatcctagcgcttatgcgatacaggaggactacaagagcttttacaaaaagctttggctactggatatcccatataagattaaaattacagtatagaaaagctcgtggaattttttagcaacacgagcaaatatggtaattaagaagctgtcgaatacaactgtgtgcccccggtgtggtttaggagaagagaatatggatcatcttttccggaagtgccctnggtcttctcgaagagctcgatatcccagtgtaggatcttctgctgcgcactatggactatctagggagataggaatgcgagcgga

SEQ ID NO: 16340 - DNA, 523 bp, Gossypium hirsutum
  Clone ID: LIB3829-017-Q6-N6-E11
tcgccgagtctttgaacgcaagttgcgccccaagccattaggccgagggcacgtctgcctgggtgtcacgctacctctgcacaagtagcacttgcctgggtccttcatcaaggggatgatgtagcaccgcttccaggaacaaccaagataaaaaatctggatagtaacattggttcactaaaagtaaagctcacagcagaagatttgaaagaaatttcggatgcagttccgatgaatgaggtagcaggtaatcctatgccagatattttaagtcgattcagttggaagtttagcaatacaccaccaaaggggagcaaggtttcaacttgaaataaccatggatgcaaagtctgcagcaaaatctgcggttgggggtaaatggactctgcaacaactgaaactattgaaaaactagatgtttgtatcaataacttagtaagctttggttatataggagtggttcagttagataagaagagtgcattaccagaataaaacaaataagcagggttgtatgattttg

SEQ ID NO: 16341 - DNA, 539 bp, Gossypium hirsutum
  Clone ID: LIB3829-017-Q6-N6-E12
gacatcaaattcaaggccttcatttcttgaggactttaaacattacacatagtagtcattgtctttcacattttgcaagtctatctatataggatttttaatacataagaatataatgcaaaagtttacaaaagtatctttcacaagacacaaacgcaattttattcagctggctaacgccatttcccacttttcctgagttgattcaccaactggtctttaacccacagcttgcgctctatggaaaatctgtgaaaagcaggcagccttatgcccttaaccctagcacatttgcactcagataacttttggcttatggagagcctgcttgttcacaaaggtctaatagatccaacgtctcaggaactgaaagctcgagacgaaacttggggccatcatagtggtgcaagactggcctaaatgcatcctcttccaatgccttgcagagtttcctaatacggattctcacctgagcaggaaaccttgactcgcctttgcattttttgtcttcccaagcagttggatcgatgttagaaccc

SEQ ID NO: 16342 - DNA, 336 bp, Gossypium hirsutum
  Clone ID: LIB3829-017-Q6-N6-E2
aagcaaaagccaaatagagctttccttaatgtacattcagtcaattatataacatggcagtgacacaacaaagctagttaaaatactttgatttcactatacataccaagcaaccatggatacaataagcaaaccacctaatgaaccatggcatgatttattctaataataaaaacccaaacacattatatactatttagatcagcttccatattatgctccggttttttttttacggtgattaacaatcagcaagggtagcaagagcagtgatgaacacatttgcagcaaaacttcagactgagagtacatttaaggtccatcaaagcgcatttt

SEQ ID NO: 16343 - DNA, 415 bp, Gossypium hirsutum
  Clone ID: LIB3829-017-Q6-N6-E3
ggggaaaaaacccaaaaaaaaataacttggggggggaaaccaaaaggaaggcccaaacaaaaaaaaaggaaaaggggggcggggcccggggaaaaaaaagggcccaaaaaaaaaaacccccaaaaaaaaaaaaaaaaaaccccaaacaaaaaaaaacccctggggaaacccaaaaaggggcaggcccgccccaaaacccgggaaaaagggggggggggccccggaaaaagaaaaggggggaaaattccccaaggggggggggaccccgggttaaaaaaccggaggggggggcgggggtttaaaaaccaaacacaaaaggggagcggggggggggggggtcccccaaagaaaaacgggggtcggcccggggccccgggggcccacccggaaaaacgggcccggccccgggggggga

SEQ ID NO: 16344 - DNA, 516 bp, Gossypium hirsutum
  unsure (1)..(516): unsure at all n locations; Clone ID: LIB3829-017-Q6-N6-E4
caaataaaattctacttaaaaaaattgaattacttgagaaagcttatcactcctcttgtttttctctcgaaataaagatgaagggacagttacttcacagatgctacaatttctccacccaacaattacattatctaatctagtttacttcatgctaaacatttactttttctactttaattgaaaagccaatttagaaactaaccagacaagctaaggtaaattgaagtagccataccaagcgcgtacactccaatcgctgccccaacaacctctttccccctcctcgccgccgcgccaatccccgcaatacccaaaaccccaagcggcactcgctgcaaaactgcctttccagcgtttcccacgacggcatcgctgaataaaaccactgcccattccctgaagtcggaggaatccaggagaagtgcttcttcatcgctccggggattatcctggtggcgagttacgaaccggaacgcanaatcgacttgggagcgagcgggaggatgaggaacc

SEQ ID NO: 16345 - DNA, 467 bp, Gossypium hirsutum
  Clone ID: LIB3829-017-Q6-N6-E5
ggagcacacaaaattcacattctgctttcattgattgggcaacaaatttacattcacaccaacaaataaaaacatgaacaagacaaatcccttttcactctctaagttcactttccggggacaaagttggtggcataggcccaagcattgttgttgactgggtcagcaagggggtcagccaagttctccaatggtccctttccggtcacgatggcctgaacgaagaacccgaacattgagaacatagccaacctaccgttcttgatctctttcaccttgagctcagcgaatgcctctgggtcatcagcaagacccaatgggtcaaagctaccacctgggtacaatgggtcagtcacttcaccgagtggtccaccggcaatacggtaaccctcgacggctcccatcaagataacttggcaagcccagatggccaaaatgctttgagcatggatcaagcttgggttacc

SEQ ID NO: 16346 - DNA, 510 bp, Gossypium hirsutum
  Clone ID: LIB3829-017-Q6-N6-E6
gaaaaacaaaatcaccatatttaactggaattgacgggcgcacaaccccatgttcaaacaatgccggcgaaaaaaggaaaaggaaaagacaagatgaaatacaaaagagcttctccaattgaaattacaaaacagaatattattctccaagaaaaaccggcccaatgttatttaacagcttaaatttactcctctgccaatggaactgattcagccagcttgcggtacttaagagcataaaacatctcaaggtaacgacgactctcacggcgttcaaggttggaaacatgcttccagaatccatacactccggtcagggtcaatagtctctccgagtaaatcttccatgtatacttctcctcgatacgtttcaagcctccttgggagatcttatcccagtgagatggatctttcttacacttttcaaagaaatcgaccagtatgtcagcagcttgatcaccatggtaaggatcaatgttgaaaccagatttcccatggacaataatctcg

SEQ ID NO: 16347 - DNA, 425 bp, Gossypium hirsutum
  Clone ID: LIB3829-017-Q6-N6-E7
aagagatatggcagtcccacatatataaatatagatacataaggaaaccacatcaatggtccccttacttctacaactaccatcaccactagtccaagtacaagttcacaccaaaatccagcattctgaacccagtagttaccttctatctggaaaatattacgtaaagggtgaaaaataaataaatgtaaaatactgatacatacatgaattatatttaatttcttactgcttcccttgcatctttccgtttattgtcgtctgttctccactcttccattctggatcagtcaattgtcattggttgagtcatgcaacacctgaaccgggctttacgcacggttgtcagtatatccgtttcagcaatctcaagcatcttcacaatgtcagtgaagggaggacgaacttctgggtttatgtcccag

SEQ ID NO: 16348 - DNA, 466 bp, Gossypium hirsutum
  Clone ID: LIB3829-017-Q6-N6-E8
aaacaaattaagattcatttgccataccatattaatagaaaaaattacacgactttgtctaataagtgtatagcaatgtgaagagaaatggaaagtacagagttattttccataattctacctataactattgcttaaggatcttacttgccattttagtcaagaaagaacaagatcacaagggcctcaacctgatgaaaacttgcaagtttgaactgacaaaattgccaaggaacaggaattagagatcgaaaatgatgttgcaaaggaactgctttcgtactaaacacgacaagattaacagaacttcaactatggaatcactattactgctatcacaactactggcagagctgctcaaccgccgccacaatctgcgcaggctgaactacagtccattcctccaatgttccagcatatggtgtaggcacatcctgtgaagataagcagatgattggagcatcca

SEQ ID NO: 16349 - DNA, 537 bp, Gossypium hirsutum
  Clone ID: LIB3829-017-Q6-N6-E9
aactaacaataaagaaatttctaattaccatttatcacaattaagtagataataaacaaagagaaaagcatggttgatcgaataccgatcattaatatagaacaaagaaacttcgaaaatcattaatcgttaggcacacgattattcatcacattaccttcacatattacatgaattaaatttcttagaaacctattatcaatttttcccccaaagattcgacctagcaccatcaaaattttcgattcaacgaaatatcaactcactgaaaattccagctttaaattggcacgtatctcttcaagacttgcttcccagcaaccacggttccagctgccaacccaccaagcgcaccagcaactgcagcagaccttacccctctcgcggcccgacaaagagctccggtcgcaagacccgccgccacgctactccagacatcatcacggtcagttacagccacgaccccgctctccatccccgcataaatcaagcccaccacaccgatcctgttcccccatgatcgacccgtgtgacccg

SEQ ID NO: 16350 - DNA, 443 bp, Gossypium hirsutum
  Clone ID: LIB3829-017-Q6-N6-F1
agaaaaagatcttctttttcgctatagctgaatttgatatacagttcctttcaaagtgcccattctaaaccaatgcacatatggaaaagcattataacataaagctgattatccttcctatgagctaaagatacgtataaacagcataacgcagaagcaatatgcagcaagcagattcctggaacaatttggggttgggaactaatgtttttttgagactataccaaggaacgtagagtgtcgtaaatggagtctatgattgcatgagactgccttgtagctgcgaactttaagtgtttaggagcttctgctctatcaaaatagaaaccaccagataccagtttctctttaggctgtaaagccaaccatataactgtgtccgcaccttcttcactagttctgagctttcccgataaccatttgttaaaatcaggtaaactttt

SEQ ID NO: 16351 - DNA, 390 bp, Gossypium hirsutum
  Clone ID: LIB3829-017-Q6-N6-F10
aacttctataggctccaaaacataaacatcaaatttaatgcccgaaaaaaaaacacgactaaaatagtaaacgatttgggatacccaacattcccccctaaatatataatttgccaaaacaataagctttcaatcaaaagcaaggggactcaattgccttttttagacaataaactcccagtttactaaaaaaagcctaatctttcaaaaattaaacatgcccataagagcatgttatatcatttcatttgccaccatgcttggcctttttgggggactcttaaccacccttggaaccaaaggacttgtttccagatccacaagaaaattggccccccgactttggactttttccaaaagttttcccaccttgcttttatgggggtgggg

SEQ ID NO: 16352 - DNA, 435 bp, Gossypium hirsutum
  Clone ID: LIB3829-017-Q6-N6-F11
ttttttttttttttttttttttttttttttttttttttttttttttttttttttttttttttttttttttctctttttgttttttgtgtttccttttcttttgggaaaaacggggggaccggaaacccaaccaaatgggggggaacccggggggtaaaatgggggggggaaacaaaaaaaagggaaaacaactgggccaccaaggggcagacaaaacagggggaaaaccccacagaaagcataaagggggaacagcccccccctggggggtcacaaaaaaaaaagcccccccaaaattttttcccccaaattggggggaagggcttttttcgggacgacaaaaacccggcccgggggaaactcgggtaaaaccccaacacaaaaaccaaaaagggcccaccttccattaacaaattaatttttcccaaggaaccc

SEQ ID NO: 16353 - DNA, 545 bp, Gossypium hirsutum
  Clone ID: LIB3829-017-Q6-N6-F12
aggtgaaaagcaagctatattctggcagatgatcacttaacaaattggcaaaaatctctttacaacacagaaaggtagcttaagtttttacagccatttcttctgggaaattcaaaccatactactacatacaaatacagggctttagtgtaaaaaaaaaaaagtgatacccaaccattgaacaaaggagaatgaataattaacaataacagttcacaaaacttccttatcataaaatgcaagaagttgcttcacgtgagaatgccaggctccaacattttgtctgtcaactgtgacccaatctacaacagttgatgccggttgctcccaccactcgtccagcaaacccctgacatatttgcagtcctccaagcacttctgagcattcaaaattgcagttttaagttcaggtagccatttctctatgacaatcttatcttgctcagctgccaaattcaaacaataatttgttgtccttgcatattcttgttgagcacggtaagcatggttcaatagtgcatgaccactttcaacaagatcctgtc

SEQ ID NO: 16354 - DNA, 562 bp, Gossypium hirsutum
  Clone ID: LIB3829-017-Q6-N6-F2
tcgcgattttttttttttttttttgtatcaaagcaaaaattgaattatatagctcacgcactctttgaatcgtatcaaaccaatagttcaagacactcttggttttctagtcttttacaactgcaattacaacacaatcaattgcatttccctttgttcaggacataaccgtatgtcctccatgaatatttggaaggaacaccatccaacaattatgaaatagaacaaagggcatgtgagtgaccgaaaacagctttttatttttctaatatccaaacatgtattccatgattttggtccctagtgattttgtagggtttgcaatagcagcgcttcctgactgtcgtgcattggtattgccattttgaagatagtataggcgagatggtcgaaaattgctcagctctgatgttctacttgatggtgggggcaaagtcatgaaaccctgattattcattctttcatttagagcctcgcgttgcattggatctactggcttcacaccgattattagtgctccattaatttgcattccattcttgctgagagctctctgagcatc

SEQ ID NO: 16355 - DNA, 544 bp, Gossypium hirsutum
  Clone ID: LIB3829-017-Q6-N6-F3
aactaacaaaagcaccaaacaaaatgtaaaacaagctaacagatgcttcaaaagtacgataaatctactgattagagttcatataaaaacatgttaggcttaatcaacttcctccatcttgctgccttcggcatcagcatcctccaatgggggcatatcagcatcagcttcagcttcacctgcatcctcgtcaatgctcaagccgagtttcagcatcctgtggatcctgttgccaaaggtgttagggtcatcaaggctgaagccagaggtcaggagagcagtctcgaagagaaggagaacaaggtccttcacagatttatcattcttgtctgcatcggctctctttctcagctcttccatgatggggttctccgggttgatctccatcgtcttcttgcttgacatgtaaccagccatgctgttatccctcaaagcctgggccttcatgattctctccatgtttgcagtccacccatactcgccagtcactaaacaacaaggtgagtcaaccacacgatcagaaaccacaaccttttcaaccttg

SEQ ID NO: 16356 - DNA, 461 bp, Gossypium hirsutum
  Clone ID: LIB3829-017-Q6-N6-F4
agcagaaaatagttgctgcgatttaagaaaaatgcctgactacacctccacacaattctgaattcaattttggttccactccacatgagacatgactatattatattcagttaaggtaatcataaacaatggatggaggtgacctgacgtgacttctagcgtgtatgataaaacacctatctatactagcaaatacataagagggttgaatgtcaattgcaatatttctttcaagacaaaatctacgccaaaaaagttgacagatctcaccactggtttacagtaaacatactagatcacggcgatgagtcagatttcggcaggttcaactccctaagttgctggagctttagtggatggttcatcctgaggtttcatggctgggaagagaagaacttccttgatattctgtgaatctggtaatagcatagctagccgatcgatacccaatccccaaccac

SEQ ID NO: 16357 - DNA, 536 bp, Gossypium hirsutum
  unsure (1)..(536): unsure at all n locations; Clone ID: LIB3829-017-Q6-N6-F5
gagaattaacagaagtaaaactaatcattggatccttgaattctcaatttaactcaatcaaaaataaaacgaaaacaaaagcaagcaacccacgattttttttacaatatttgtttaccaaggctaagtgaagtttacagccaccgatttgttttaaatgattcaatgcaagaaagcataaacagcagtggaaatgtaaatcaagagagcagaagaaaccagaatgactaaagccgccgtggcatgaatggaggactggctgccgcaagacaacaaccccagccggatctcgatcacgttcaccatcgaaagcatcagaaacaagcaccccatgacggacccgacggcggagcccatcatcccaaacctcaatacttanaggttaatgtgtgccctgaaagcttcatccacatctttgctgttcaacaaattgatggcgagctttagaccctgagccaccagggaggagaaaaggaagaagctgaaggagacgacctcnaagaccaagagctttttagctacgtcaatgccggcgt

SEQ ID NO: 16358 - DNA, 544 bp, Gossypium hirsutum
  Clone ID: LIB3829-017-Q6-N6-F6
gaaataaaaatatcttatattatcatcaaagagattgccaactagctttgggttttaacataactggctctagaaaaataacttattacaagataaaataaaaagaaaacttaagctgaaattgatgctgaatcaaactatttttgcttttttaacatacacaggaacccagtattttggtactcacaaacacatctaacacaaatgctttcttcattgcattgggggcatgataaatctgtccgctaatgaccgttggcaacggaaccattatcgcaagcagcaaagtccccgtctttctttgcgtagaatctccggtacatggaatcaacttcggtgaggtagtatgttccgggagacaaaaggctacagtctttgcttgtcacgaaatccttggctccgtacctatgctccatgagcttcatagtctcaacaaacttctcagggggaaactcgtgccttgacttcaatttcccggctacattcatcaccgatgcaatgttcgataggctaaacgggtgttgaccttcatggaatcgcaatg

SEQ ID NO: 16359 - DNA, 506 bp, Gossypium hirsutum
  Clone ID: LIB3829-017-Q6-N6-F7
ttttttttttttttttttaaataaaaacaaaaatttattaaaaataataacgttttacagtccttttacaaagcccaaaactgctagcccatttacatagcccaaatacctaaattacccggtgcccaattacacccaagcccatactatagaccaaatgccgcccaaaatacacaaggcccaagtggcccaatttgttaacaaaagacagaaggcctagggtttctgaagccctaggcgccgcaagcacctcgacaccaggcctgaactcgcgccagtgaatcgtcatcgccggattcctcgctggtacctgcaaaaagaagagaaccacagcagaaaagagaaataaacatggaaaagaaatcaaagatttctttctaaatgtaacgattcacaaaaggctataaaagcctcttcactaatctgtaaaagggaccctttttttttagataaaaagaaaaaatagatacacagatattttcaaagagatacaagcagtttttttt

SEQ ID NO: 16360 - DNA, 545 bp, Gossypium hirsutum
  Clone ID: LIB3829-017-Q6-N6-F8
gaataaattagatagatatatatttagtaatggattaaaggaaaacacctatctcattctgtccttaatcatttatgtcatgcataaaaaatgcccataatcatttgggaatgtcccaaaatagatccacaaaaacttatgtttgtacattaagaacaaggtaagactagtcaaaattgattgcaggcttacttgcagaagacacgattgcctttcccgacgaagcttcaattatacgatacatcaccgtgtaaaagaacttaatatcgcttctgatggattcgattagaggcccgactcactggagtttgagaactggtgtaaggcaccttgcttcttcatcttgaattggaattcaagacactcttgctcactctaaaatatgtacactgacactgcaatgccggtgctgcatttttggaacttgaacaaaatatataaagctcctgttgtcaatcaccaccatcttcttcttgatcctcaaattgagattcttctttcaggtttatatcttcacctccagcatcatgacttccagtatgctg

SEQ ID NO: 16361 - DNA, 547 bp, Gossypium hirsutum
  Clone ID: LIB3829-017-Q6-N6-G1
ctaattaaaaaaaaccccatcccccagcaggtcagtttaataaaacatatggtacagttttcctaagatattgccaagtcttttcattattgatatgtttcacatgcatatgcaaggaaaggggcattacaagtagctggagactaacttcctttcattcataggcataggctcaaaatcagcttgcatattgggcaatcttactttcaagtgtatttttatcagccccaactaccttatcaacttcctttccatttcttataaagaagaaggtaggaacactgctaatgttccatcgcgctgccacatccctaccctcgtctatatccacttttaagaaaactacctttgcatattttgcagctaaactcgtatagagaggagaaatgaagcggcagggaccacaccatgttgcggtgaagtacaatatcgccagccgtgatgttcttgtagcagcatttaacttaatttccagctcactggtggaatgaacgccaataacctggccatctttaaaagcagataatgcttcctgatcttgtgcctc

SEQ ID NO: 16362 - DNA, 535 bp, Gossypium hirsutum
  Clone ID: LIB3829-017-Q6-N6-G12
cacgagggaaaatcttacagttatgataaatataaaaacattgatagcacataactagtttgttttcatacaggcaatgaaacaataatacaaggagctaggaaagaagatgaaacaagaaaatgggaaattttcattatacaaaacgggagtgtttcttccaatttcttcccccctacttccggttaaacaaacatctaagttttcccctttccaacctctcaagtagcttcttggcaccaggggtttccatctcgaaaagcttcttgagatacccaatggctccatatgagatcataagctttttgcatttcttacttgatgagagagatgccaggcaagacacagcatacttttttgcggtgttttggggacttggatcaagcaactggaccagatttggcacacttttatcgtcctttttcacttccctgcaattctgggacacagttaccaagcttgaaagggcttgagcagctacctctctagcattgtttgatttagcctcaagcatcctaataagaagaggaatgca

SEQ ID NO: 16363 - DNA, 544 bp, Gossypium hirsutum
  unsure (1)..(544): unsure at all n locations; Clone ID: LIB3829-017-Q6-N6-G2
aaatacttaaagtccaattacatagcataagtccaattgcatgactctattactaatacttangtccaattacaaaaaaaaaccagtagccccatagcccaaatataagggcccaataactggaacagacccaaacagcccgaaacccaagctaagcttcggcaaaccctagggcaaaaggggtcctcgcaccgcagccttcacgaacagcaaccacgtcgtgccacgcccgccctccgtacgataccagcgtctcagcagccagcacgccccgtacgccagcgcacacctgtacctgccaaaaaaaaggacaaaccacaacagcaaatacgtgcaagaaaacaaagaaatgatttttcattttcttttttttcttttcttttctcttttgtctctcggctataaagcctgaagagaattgcttgtaacgggttacgcgcatttacgcaaacagaagcaatagaaaacgaaaaagaaggtgatttactcgcaatcttcgtcccttatttctctcttatcttcccatctgcccctttcttgattg

SEQ ID NO: 16364 - DNA, 541 bp, Gossypium hirsutum
  Clone ID: LIB3829-017-Q6-N6-G3
aatataagtacggcaatcccactcacgaatgaattaatgcaccataaacatcaaattccatatgactcgacaatgatatatgaatacaacaatataacagtcacaagggtgaacattattgcaaaaatccttaaatccaacattttgcatttttcacccactctccatccactccatcgaattacatccatgccgtacaatggatcttacatcatcaacccaaacacactgcacaaatcaaaaagaatgtgtggctacgtcacaaagttgaactaaaatgcaatttcacagggtgcatgaaatgttcttccacggcatatggactccaagttttctccagtgtacgaacaaagcggtgatacctccacaccagttgcatataatggcactgaatgtgttaagaagccaccagcagctactacccatcgtgtgtgtagccgcagaacaagcaaccttgcactgtctggagtgtcataatttgaaccgttagcatttttcactggtgcaaactcttcctctcgtaatacctcaaacaaagcag

SEQ ID NO: 16365 - DNA, 384 bp, Gossypium hirsutum
  Clone ID: LIB3829-017-Q6-N6-G4
aagcttaataatatttcctttaaaaataccaagttcactaaacacgaccaaaattcatcttattcacaaaatagttaatccgtacaggctgaaatggggcgatctcctttaactaaatagttgaaaactggagtgaaacactacattcaagactcatttggggtgggctctaaaccacaacgggaacctcgatattggcatggggagcacgcggatcaaagacaaacttaaagtggatactctccctcttacttgggagggtggatggggactagatcatgctatggggacaaaggaccctggttgcccttcgaatcccaaaacaggatgattctaactttgatacccagaacaccctgcctaacaaggacatgtgttacaggg

SEQ ID NO: 16366 - DNA, 554 bp, Gossypium hirsutum
  Clone ID: LIB3829-017-Q6-N6-G5
ctgcaggtaaggaatcacttgtctgcaattgccagtaaaatgaactggattcagactcggattgcattgtatttccacaagaacttgagttcaactttggcagcaattagaatacataagacattcaatgatatattatatttaagagtggtgatgggcaacattcatacatcacaatccccatgtttgctattttggtttttttgcttttttcttcaccctttggggcaacaatcatttaccaaataccaaagcttcaaaatcttgtggacttttggattctacttcagtctctccctccttagcctctccatttcttttaccatttcccaatgttcctttgacaaactggtttctccaaaacttgacgaaatgagccgagccattgtcaaccatctgctaaaatctcgacttcccaagctcctatccgtttgtcttgctgcaaccaaatcatcttctaccaccttctgtatttctgatccaatggaatgtggtaacgatctaacagtagccaagtaccatctccaagcttctagtgcctcagcaactggaat

SEQ ID NO: 16367 - DNA, 453 bp, Gossypium hirsutum
  Clone ID: LIB3829-017-Q6-N6-G6
aaaaaacttcagttttactattaaaatatcaattaattatttaccaatggttttttatgcaacttttagatttactggtaaaaccacaagcaagcatggggctttgaaacagaaaataaataaatgctcactttggccgacattcgggcaagggtaatctataaaaagggggccggaacggggcaatcaaaccgggaagacagggtcgaagctaatacaaattttgacaggatactactttggatataaagcacaaaaaggttttccagggttgatgacaaaacgatggtggtttcagggtcttttagctgggattttttcacctttctccgaaataaaccttcatccgagggtcttggttctcctcctcgagttctgaatttttggacgtaccattcagcttcgggtcactttgagtaaacctttcaaccatattccctttaccaattggat

SEQ ID NO: 16368 - DNA, 533 bp, Gossypium hirsutum
  unsure (1)..(533): unsure at all n locations; Clone ID: LIB3829-017-Q6-N6-G7
atacaaatattaacagagtattaataacataaaaatgagacttgtacaaaatcaatggtcaagattccatagttatttggattatacaaatcacactaccttcatcttctttacctattaatttagtgagcaatgaagtaaaaaagaaagaaaagaagaaaaaaaaacacttggaaaattacaattccaaaatttaacgtagaatattactacatggctaccttagttaatttcaaaacgacggaacgacgccaaatccatacatgttaccgccgtcgacttcgacttcaacgtcactgcgctttgcaaatcttcctttaatcctcggccgcacctccgcgtaagctttcctagaagcgtaacgtatcgttttctcgaattttctggtctttctcttctctctgnacctcagcaccctcgcttctctctccgccaacgagagttgcacagtctgataagtcgtctccgtcactttcgcgcacgggactgatacatccgtaatcgtactaccgccatctggaactaccccaaca

SEQ ID NO: 16369 - DNA, 77 bp, Gossypium hirsutum
  Clone ID: LIB3829-017-Q6-N6-G8
aaccaagtatctcaacttttattaaatctttgctactcagcaaaatcacattctcagatgttgaaaagcctattctg

SEQ ID NO: 16370 - DNA, 265 bp, Gossypium hirsutum
  Clone ID: LIB3829-017-Q6-N6-G9
attccaaaaaggggggagccaaaaaggggggggtaggccttcggaaaattcgataccccgaaccccggggtgggggtttcccaggtaaaaaaaagggggggggggaatttaccccccaacaaaaaagggggcgggaagggggccaaaacacccaaaaaaggggcctccccgggaaaaccggggcccaaaaaccaaatttccgggagcaggtttttgtccccggccaagaacatcagggggggaaaaaacccccggacccgggggg

SEQ ID NO: 16371 - DNA, 548 bp, Gossypium hirsutum
  Clone ID: LIB3829-017-Q6-N6-H1
ataggtaaatatgcaaattccattcaaagagaaaccatacatagatgcaaccggtaaacaaagactagaaattatttaaaaggccattacagggcacagtccttcacgtaaaaccagaaaacccacattaagggagaccttaaggcttagaacccaccacgaagacgaagaacaaggtgaagagtggactccttttgaatattgtaatcagccaaagtccttccgtcttccagttgtttcccagcaaaaatcaacctttgctgatctggtggaattccttctttgtcctgaatcttcgctttcacgttatcaatcgtatccgagctctccacttctaaagtaatcgtcttaccggtcaaagtcttgacgaagatctgcatcccacctcgaagacgcaggaccagatgaagagtcgattccttctggatattgtaatcggctaaagtccgcccgtcctcgagttgctttccggcgaagatgagacgttgctggtctggcgggatgccttccttgtcttggattttggctttcacgttgtcgatcgtgtc

SEQ ID NO: 16372 - DNA, 401 bp, Gossypium hirsutum
  Clone ID: LIB3829-017-Q6-N6-H10
gggagaatagtttgcaaagtaacttattattgccataaatttaatataagttgatacatgaactgaataggcgttaagcttcccgcccacaccatcaaaggcttttagtctttaacaataaacacacaaattcataggattctaaaaaaggaaaaaagaagaagataaaactgcaagccaagtggagcacgaccaattacttaaaaggcatgtttgtttaactttaagcagcaacactatggagcacaacagtctcaacagtgaggccaggtccaaacccaaagagcactccccactccaatccttctcctgtggtctgaagcccatcttcccttgatttcttcctcatctcatccaaaataaatagaacacaagcacttgacatgttaccatactctgaa

SEQ ID NO: 16373 - DNA, 487 bp, Gossypium hirsutum
  Clone ID: LIB3829-017-Q6-N6-H11
ggggccaaactatcaatattccattggttgggaggaccattaaatgctaacaggcatagagattgggggaagaaattaccaggggtggggggatacaatccatcaatggccactccaaagtggaaatgaagccggaaaaaaaagggattaaacattattacaggccatcaatccattcggaaaatatgggaaaacaatcatttttttactgggggaattcagttttatgaaaaaattagttttttctaacataccattttaacttttcacactcccaaaaaatcttgacagggggactggaccctcacctttttcattttgggggcttgggtttttatttcttgggtggggcctctttttcttctctcttctagacttggacttggatctttttgattctctcttttcatcatcactactcgaagattctgggggtgaactcggggggcttggctcaaaagacccccggcttgaaccctttcttttt

SEQ ID NO: 16374 - DNA, 172 bp, Gossypium hirsutum
  Clone ID: LIB3829-017-Q6-N6-H12
gggggggtttttttttttttttttgcatcaacaaacagcactaaataaataaaaccacatttaacaaactaacaatgaaatttctgtgcagccagggcacctgtatgatatagccattttccgtacaaaacagtgccaaaatgtcattattattgttgaggggggggggggg

SEQ ID NO: 16375 - DNA, 542 bp, Gossypium hirsutum
  Clone ID: LIB3829-017-Q6-N6-H2
aaatgacaatccggaattttatgtattgaaatattaggcatagaatgaaggtttttgagggtaaattaccatattactgcaatgttaaaacaaactcaaaaggtttgattaccaacaaaatctttggtcaaacagatgagcaattgcacaatactgatcagaaaatagttctttgatagagcataaatgaacgctagagagttgatatactaatcatcagttgcgtaagtgcttcattcttccatggcgtcgcctccttcgatgatctccactttctccttaaggggtatgatttttgtcaagaggacctctgtcttcttgggaaaagaatagcctttggagctggtgtaagttcgaggattaggttgtaaatggttcctcaagtattctttgccacccttagttattacacaaatatcaacattgcttccactaccgaggtcattgaagataccagagcatatagcctcagtgacaagttctattccttcgtttctagtaaggccttccctgtattttgattcaaatacagccattgctgc

SEQ ID NO: 16376 - DNA, 257 bp, Gossypium hirsutum
  Clone ID: LIB3829-017-Q6-N6-H3
ggtaaaatataagatttttatagatatggtcatggattcgaatgaaatgggattaaaaattacaccgagaatgaatccaccacatcagcatcatcacggttgactcaaagatggttaaagtaaaacacagatttggaaagtagaatcatgagaccctacaaaattacatgttaagtttaccataagatgctctgtctcgtactagaaaacacagaccaaaaggtctaaagtttatgtcctaacatttgtccttgcat

SEQ ID NO: 16377 - DNA, 396 bp, Gossypium hirsutum
  Clone ID: LIB3829-017-Q6-N6-H4
gggcccgaaaaaaaaaaagcatgccctttttaacacactgaaacaaataaacagggggcaattttcaaagaaaattaaagaaaaaaaaaacttgaaaacgaactaaaggggggggctaacccccacaaacaggggcatttaggggggaaggggattaaaactccccaaagggccccaatacatagggtctatagaaaacaaatcacatttccccgaaactacggggttatcatcatcaaaactgataaaaggcttatgggataactctggaaaacccgagtttgccggttcgaaacctataaacatttcacttaagaaaaaacatactgggggaaggaaggaagcttcccgggggcaaatgcctaaaaaaacccgtttcagttagcacgggttttg

SEQ ID NO: 16378 - DNA, 541 bp, Gossypium hirsutum
  Clone ID: LIB3829-017-Q6-N6-H5
cccaaactgcttcataatattgctgcaaaagtgtaggcgcttgctaggaaatacaagaaacgtatataccataccacattgttcgtaagacaaaaaaaatgcttagagcaaactggattcagaaatacataacatgaatatcgctggaatatatataaatataacaagtttttctacatataaagaccctccggaaccccttctttcttcttgaacatcaccttctccttggccttttgaaaatctgcatgtgtcaccttcatgcggcgctcccttaaagcaagtagaccagcttcagtacatattgcctttatatcagctccagagaactcatctttggtcataacaaattcttccaagttgacatcatcagccaatgtcatccttgaggtatgtatctggaaaatgcgcctcctggttttgatgtcagggagaggaaattcaatcttcctatcaattcgaccagggcgaagtaaagctggatcaagactttcaattcgatttgttgcaagaatcactttgacatctcctcttgaatcaa

SEQ ID NO: 16379 - DNA, 282 bp, Gossypium hirsutum
  Clone ID: LIB3829-017-Q6-N6-H6
acaagaataatcaatcattaacacaattgactggtagatatcatcaggtctagataacaagcatccatgtacaacccataatgaatagcacataaacatggcaaagtatggaagataaaacttcgaccgcagaagtattgcgtaagctacttagaagatacaggaaggaaaccgtccaatgcctaagagcaacaagtggcactagcactccgttctgcaggtctatccatgagaaccattccagcaggattttgtgctggctgcactcggagtaatcttttg

SEQ ID NO: 16380 - DNA, 495 bp, Gossypium hirsutum
  Clone ID: LIB3829-017-Q6-N6-H7
gaaagccgaacaaaagttctcaatattacattaaaaagcttgcttaagaaggtaaagtaggcagtatcgtccccatctgcatctgctccttatttttaactgctacagaagggggggattgatcttcaaatgaaatttcatttatgatctaactattacaaaaataattagtctccgtaatttggaggatgagatcaaaaccatcctctcctaaaaccaacagttttttccaaaacagagcgacttgataaaaatgttctcaacgcaaaaaagaatatccttccaccagcttgacaaaccattccagcaatcctatgtttacttgtcccccatgacaacaggttttccaacattctataccttggcaagctccacagcagcaggcacaggagcaacaccaccagtagttggcagccccacaaacactttgaaagcatcatagataccccactgagctccagttagagttccaatcatcacaatacggaggggaag

SEQ ID NO: 16381 - DNA, 547 bp, Gossypium hirsutum
  Clone ID: LIB3829-017-Q6-N6-H8
aggtaaatatgcaaattccattcaaagagaaaccatacatagatgcaaccggtaaacaaagactagaaattatttaaaaggccattacagggcacagtccttcacgtaaaaccagaaaacccacattaagggagaccttaaggcttagaacccaccacgaagacgaagaacaaggtgaagagtggactccttttgaatattgtaatcagccaaagtccttccgtcttccagttgtttcccagcaaaaatcaacctttgctgatctggtggaattccttctttgtcctgaatcttcgctttcacgttatcaatcgtatccgagctctccacttctaaagtaatcgtcttaccggtcaaagtcttgacgaagatctgcatcccacctcgaagacgcaggaccagatgaagagtcgattccttctggatattgtaatcggctaaagtccgcccgtcctcgagttgctttccggcgaagatgagacgttgctggtctggcgggatgccttccttgtcttggattttggctttcacgttgtcgatcgtgtca

SEQ ID NO: 16382 - DNA, 138 bp, Gossypium hirsutum
  Clone ID: LIB3829-018-Q6_N6-A1
aaaaaaaaaaaagggggggggggggaaaaaaaaagggcccccccaaccagttggggggggaattttaacccccggggaaccttaaaaagggggggcgaaccccgggggggggtcttttttgggaaaaaaaaagggggg

SEQ ID NO: 16383 - DNA, 435 bp, Gossypium hirsutum
  Clone ID: LIB3829-018-Q6_N6-A10
agaagttgaacattttatcttatttcacattgctcactactcataaaaccatgcagagaaactgattctctttttaagttcttgacaacattactaacacccattagctgctataactatggatatatatcatactatctcctgacttttcaccctcaaaaatagcactactgacttcacgtatggcaggtcagtttgttttccgccggtcaagccaatggctatcgagagtagacaggtacttggacttggttgtctaagaaaacaggttactaagctttatccatagttgccttctgattatgctcagggtgtggcaacattttccttggcaagaggagcaacctcctctcctttaatgccaggttcactgccagccaccccgaggcttaacaacatcttttcccacaaccttgatggtccctttcatgaaaa

SEQ ID NO: 16384 - DNA, 319 bp, Gossypium hirsutum
  Clone ID: LIB3829-018-Q6_N6-A11
ggtcaatcacaagatagagctaagcacttggattactaacaacttataacagctacagcaacaaattcaactccatggagaggcaatgtaaaacttacaacaaatgttgttttatggaatggatgtagtaacacttacttgggtcaggggtagttatcattgccacacccttgaaatcacaagatccagacgctttcccttccatttgataatagctatcaaaggcataagaagcatggttcttcacattgttaggctggtagcagctctcccctggttgaatctcactgcaatttgccctcccaggaccacaagccca

SEQ ID NO: 16385 - DNA, 540 bp, Gossypium hirsutum
  Clone ID: LIB3829-018-Q6_N6-A12
caatcactctaaaatccttttcattaaacaaattataaaagattccaaattacaatcatggaaaagaaaaagaacaggaaaggtggaaagcacaaaaagcaaaactgagcattcccattatcatgataggttgataagtttttttttttccagggcaattggaatctcaaaccctgaagcctttgctgttccttcttcctctagccctctcaaatttccttccttttgaccgcacatagggcttggtgtggctgtgtggcacaccaggagcaggtccgaagtgcttcacagcctcacgagcattctttggacctcggaggagaaccgtgttctgtccaagaggtgctcgaagagcaagttggtcaaatgttaaacattccccaccagccttgtcaattctcgccctcgctgtctcagtgaaccttagtgcagtaaccttcagagcgggaacttcatatacacgaatgtcatcggtgacagttccaactaccactgcaatcttatcctccttgcccttcatgaattcaatcaatctggata

SEQ ID NO: 16386 - DNA, 408 bp, Gossypium hirsutum
  unsure (1)..(408): unsure at all n locations; Clone ID: LIB3829-018-Q6_N6-A2
gcaaaggaacttattattgccataaatttaatataagttggtacatgaattgaataggcgttaagcttcccgcccacaccatcaaagtgttctagtctttaacaataaacacacaaattcataggatttaaataatctaaaaaaggaaaaaagaagaagataaaactgcaagccaagtggagcacgaccaattacttaaaaggcatgtttgtttaactttaagcagcaacactatggagcacaacagtctcaacagtgaggccaggtccgaacccaaagagcactccccactccagtccttctcctgttgtctgaagtccatcttcccttgatttcttcctcatctcatccaaaatgaataaaacacaagcacttgacatgttaccatactctgaaagaacgtncctt

SEQ ID NO: 16387 - DNA, 365 bp, Gossypium hirsutum
  Clone ID: LIB3829-018-Q6_N6-A3
ggcacaacactactcatacatatatgcccaaaaatttggctaaggttttaaacaaaaacaaatggcaaaagggtacactacttgaaataattaataaatatataaaatacactatggaattgactctgcaaaagaattttggaacaacaaatttgtcttttctcagggccccatgttctaggcaaggggggaaaacaaatataatctacaagcccttttgggggaagacagaccatgctttacctcgatcccgggtttatgccgatatcattctttattgatcattaaagactgaaaaggcaccctcttaattgcgagaaatggcaaatgatccaaacttatgggctgtttccatgggcccccac

SEQ ID NO: 16388 - DNA, 416 bp, Gossypium hirsutum
  Clone ID: LIB3829-018-Q6_N6-A4
cactagaaaaccctttccctcctttatttcacgtattaacaaactcaaatcatttaaatgtcaagttcactattttaaataagtctcgacaaataaatacccataaagtatgaagattagttaagattgaactatggttcaatattaatttgtcaggaaagctcaattttagtccattttctacacaaagtaataagcaggagggcagcagcttggcatgaaagaccacatatcaaccctatccacaaacccttaccataaagcttaaacttaaaagcaagaagccctgcaactggcattccaattaaataaaaggtccccaagttggcccacacagccaacacctgccatccgctttctttggccacccctgataagatgccttgaaaagaatccatagtaatggagattaaaag

SEQ ID NO: 16389 - DNA, 432 bp, Gossypium hirsutum
  Clone ID: LIB3829-018-Q6_N6-A5
caatcaactatccaaacatgttgaagacaaacgaaacaacaggaaaaccaaaacagttttgggacttttagtcagctcagacacaacgacagcaacaatcttgttattcctctagatctgagtacaattactagactatgaattagcaatttagcattgaatacgacccaatataccaatcccattcactcataccctgagaatctgaagcttggtggagaaggcgatggcaacccaatcaggctgggaagatgaccactgtaactgctcgatttcagccccagcggtgtaggcaaggatggggtcaagcccaccctccacaggctgactcatggaggacaagtcccaaatcaaggcctgggaatcatccccggcggtgcaaatgtggcaagagctgtggggtgcccatgcgatggcattgacgctagcctg

SEQ ID NO: 16390 - DNA, 520 bp, Gossypium hirsutum
  Clone ID: LIB3829-018-Q6_N6-A6
gatctcaaaaaaatcaaaatgaatacccttaaaagggttaacatttttactcgttacattgcatcattgtttaagttcttcaacatacaaaactattcaattaacataaaataaaaacaaaaaataagacaacaccatatgccaaaggatagcatttttaatgtaaaaaaaatacttattgtatatatcctgatctgcaacatgaaatcacacccttactctataatatgtaagatgttgtgtttttcaccatcttccattttcagcgataactttatcgtcgataacttcttctgaggatgttgcaaattctcttcttagattctcaaccttctgtttcaatgctgtgtcatccaaggaggtacgaatctcctccttgatctctgcttgtaatttttctacctttggtgaactagagtctatcgccatctccgctttcaattcttcgatttttccatgaagaccggcaacatcgattaccctttcgatctctccatcaatctctttcttcacgtttacg

SEQ ID NO: 16391 - DNA, 445 bp, Gossypium hirsutum
  Clone ID: LIB3829-018-Q6_N6-A7
ctgtataaatatcatattagttctcaaatgccccatatcacaaaatggacaaagaaaacccaaatagagaagaaatcaaagagagtaagaatatagtatggtaaattggggtccagatttctgaaccggtgcttcattcccaatacaagcaagcgcatctcctgcatttatgaaacaggagctcctgatcaaacattagcagggaaccggtgttccggccactttggatatgcccgcttgtacaagctcatgcaaacagtatcgtgttgttgaaggcccccattaaatatgcatttcattgcaccatgggtaccaacgggttccttaactcgaccacgacgaccgcacttcgtccacacttcaacaggcttaaaccatctcacatcctctggattatggaacatatatcgcactgtggcttttaacttggatactcgttgaggat

SEQ ID NO: 16392 - DNA, 547 bp, Gossypium hirsutum
  Clone ID: LIB3829-018-Q6_N6-A8
gaaattcgtatgaaactttaggttccattatttattatatttcatgaaaattttaaaacagaaggaatgtacaacattcggattaaagagctcttcctaatctcagtaccaagcgtcacaaaattaataatttacttactaagtttacatgaaatgagaacgtcaatttgttgaaatgaatgctgccgtatctcagaatgtaaatcatgtatttagctatacattgtttgtatacctcaattgtccttgcagttccttgaatagcttgaagacaatcttgattgcgactgaaagaaatcaaaaggagctcctgatcccagcgaccttcttgaagagtttggtgaatccgatagaagaggttcataaactgggtttctgttctttggttgactaatttgcaagggagaaactacttctttctccatcggtcttgggtgcggctcgatattgcctaaagtcagaatcggcccacccattcgttcagcctgctgaagtgtattgattttacttggtctgtatgtataccgggagtacttcaaagctagaa

SEQ ID NO: 16393 - DNA, 451 bp, Gossypium hirsutum
  Clone ID: LIB3829-018-Q6_N6-A9
gacaaaatctggcgacagctttaccaagtattctcaattaaatatacatcatgggctacattattaattacaacaagggaagcatggctcatggccagccatggagaagggtatcctatggaaatccatctcctaaagtacatgtttacatcaaaacagctcaaattcaaggtggtctcctgtaccttttcattccaaataattgctctctgcttccggggacatcatgctcagaatcccaaattcatacaactctggcagttccggtggaacagcacatcgtatcaaagcccaattcaagccttcaaagaaaggatgttgcttgatttccgcagcccctttttctgttcccagccgattctctggctccttcaccagcagccctctgatgagatcccttgcctggaaactcacaagaaggctgtctgggaacttaaggctctctagcaca

SEQ ID NO: 16394 - DNA, 387 bp, Gossypium hirsutum
  unsure (1)..(387): unsure at all n locations; Clone ID: LIB3829-018-Q6_N6-B1
acatcggaaaaanataattattctgatttattactaaaataatccaaccgaaaaccgaatacattgctactaattgcattacccaatttaaagatagatcgagaaaaatgattcctaaatagctacgaacagattctcctgaaataaaattttatagaaaatggtttggtgaaatgcattgaaaggtaaaaaagataaaaatttcaaaagataaccaaattactctggatttacagcaagatcttagttactattaccctgcccctactatgaagatgacatatgattatcccacgctggcacggcttgccaagccgaagccgcgatgagagggctgttatgccaaccaagactcaagcacccttttattttttttccctgaatacc

SEQ ID NO: 16395 - DNA, 153 bp, Gossypium hirsutum
  Clone ID: LIB3829-018-Q6_N6-B10
gaggattctttttttttatttgttttttttctaattttataaattttttttaaaaaaaaaaaaaataaaaaaaaataaatgtttttggaaaaaaaaaaaaaaaaaaagaaagggttataaagagaaaaaatttgaaaaaaaaaattaaaaaga

SEQ ID NO: 16396 - DNA, 521 bp, Gossypium hirsutum
  Clone ID: LIB3829-018-Q6_N6-B11
aaaacagaaacaagttttagagttggataatataaaacgtgtagatagaacattgagtgaaggaaaggagcccaggaacagacctaaagctccaggaccactttggtggaaaaacgggaacaaaaactatcaaggagcttatagctcgataacgcataataatattaatgatgacacactattgactccaaatataaacctcaccaccgcctatcaagaacccagttctgggaacaatatccaagagatgacggtgaagcattaaaacatgtaactaaacgtccagtgatggacctactaacatgaaccaatttcattggagtaaccatgataaacttttgtcgaatcaacaaaatcccgaggttcacttgcccttcttggcagcagacttcgtcaccttggctccagttgggtccttcttctccacactcttgatcacaccaacagcaacagtctgtctcatgtccctaacggcaaaacgtccaagtggagggtactcggagaaagtttccacaaccatg

SEQ ID NO: 16397 - DNA, 553 bp, Gossypium hirsutum
  Clone ID: LIB3829-018-Q6_N6-B12
cagagacaaagtagccatataaattattggtcaaagataaatagggattctaacaataaagaacaaaaagccatttctattctgtattcctttattgctccatatattttacatatcaataaaatccttgcaccaaatccaattgaatcaatgtataacaagaagaaccacatctactccctgcaaatactggagtttttcgtcttcatgctcgactatcgcttacatggttcggtacttccgcttgactatccaatggcatgtactgtgccattatagctcggatttcagagtccatgtatgaccttaatctatatttgtaaatgagataagccccaccactggccattgccaagccgattaaaatgacccaaacggctgcccatgatgatcttacttcggtactgctcttacttatgcaggtatcatggtcctggatatacaaaagatctccactgcaagtgcattcatagcttccccaagtatttttgcagctacattcagggcactggcaggctttcttctctttgcattcgtcaatatcttcacaatt

SEQ ID NO: 16398 - DNA, 484 bp, Gossypium hirsutum
  Clone ID: LIB3829-018-Q6_N6-B2
gttatcaaatataatctctattagccactccaatagctaatcattctcaaacatttccatgccatccatgagctatatcataagattatatacacaaaaggattataatgttatacatgccatattcccaaaatatgcaagccaccataccgagatggtccgttgatagtgtgagcgtgcctccgaccgtcctgatcgtcaaaccggcttgtcagaactcgatacaaaatgagaatagtcgagcctattcctcgtaaactttactttttccccgatctagaatcgaatctcttttctcttgatcagcgaggccgattcttactgacagatgggttgctccgactggaccgagggtaaaaatcaattttggcgcttctgtttttactgcagaagcgttggcgggtttctgggcgattcatctcggtttattccttcagttaagagaggttgaaattgaaggggactctcgttcagtcatccatcg

SEQ ID NO: 16399 - DNA, 547 bp, Gossypium hirsutum
  Clone ID: LIB3829-018-Q6_N6-B3
caacttgaaagacataccactgacactaatttaaaattccttcatacaacagctattgacaataatgttttcggtggagaaaaaaaccttgaatgtgaaaataaagaaaatataagaaataagcatcacaatcactctctagctacaaacatcctattaaacaacatagttgaacgatacatggaaaggaaggaatagagcatcaatagtttgcccactaccacatccagagggccatcatctcaatggttgtggaaacaaatgaaagccataatagtacatcaagatcaaagtacatcctccttcagtgatcccaccttcaacactttccccatataaaccggaccttgatttcaattttgacacaggacacgaaaaagccaagtaaatgaaaatgtaactcaccatcaaagaacttataaaacctagaagcacttcctgtggacaatggatggaccggactcatcatactcgcccttggaaatccacatctgctggaaggtgctgagtgatgccaagatagatcctccagtccagaactgaactt

SEQ ID NO: 16400 - DNA, 56 bp, Gossypium hirsutum
  Clone ID: LIB3829-018-Q6_N6-B4
tttttttttttttttttttttttttttttttttttttttttgttttttcgattttt

SEQ ID NO: 16401 - DNA, 538 bp, Gossypium hirsutum
  Clone ID: LIB3829-018-Q6_N6-B5
atctgcaaccatccctctgaattagcaaatcattattggtctaacatgagtttacagcaatcaactcaatggctactgagttttattaaccgaatcaaggactcttaaattgaactctaatgaaaactcttacatcaatgagtttcatcacaaggtttttctcctctctttatatcaatgggagctgagcctctgtatgtccaccagcttgtaaagatctcctcgtcgttgtttcgtgaagggaagattcgcccttcgttgctcgagtattgagtaatcaatctcggctattattatgtcttcttcatgttcagttgtagctaggacttctccgaaaggtcctacaagggttgagtgaccccaagccacataaccagctccaggatctcgagcaggcgaacaagttgcaacatataactgattatccatagcccttgctctctgtgacaactcccaatgcaatgggccggttgtcatgttaaatgctccaggatagcatattaagtgagcaccccttgcagcatatatcatcgataat

SEQ ID NO: 16402 - DNA, 380 bp, Gossypium hirsutum
  Clone ID: LIB3829-018-Q6_N6-B6
agacatcataaaataataattctaaatcagaggtttaaatatctttgatctttgaatttcacatgtgccctcagactgacgctagttccaatgaaattcaatggatgataaacagtatttatatatacaaagcaaaacacagcagattagagttgtatagccttacgcacctataagcctcctatactataagttcatcttccagatagttatactcaaagatgaactcagtcttgattctctgacaccatccatgttggtggccataatttgccacgcgaaaatcaagactatataggttccctgcccaaacctatgacaccctatgagcggtcccttgagctcttactaccactagtgaactttctcggggaccaaca

SEQ ID NO: 16403 - DNA, 287 bp, Gossypium hirsutum
  Clone ID: LIB3829-018-Q6_N6-B7
gcagaagaactatagatcatcttatttttattatgtaaacattgggatcctataagtataaactagctcgtgaacgttgcaggcactggcctacagtcctttttacctttgttcactccttgtacagcacccatgtgcgagatcttaagctgtcagccgtgaagaacacatgatacctaaggcagaatctggactactcggttgaaaagaatggcggggttacatagataaatctgaagaaagctgtgaatgggcatattccggaccacgtaaaagtgagattcttt

SEQ ID NO: 16404 - DNA, 470 bp, Gossypium hirsutum
  Clone ID: LIB3829-018-Q6_N6-B8
gatgagagaaatgggattgcttcttatttatgataccaataatacaagccacaattaatagttgcagtaatgaaatcaataaaatatagtaagcgtaaacttggcatacctataaaatgaggtttagggatttaagcttggcacatacaatccggagccggatatgtatatatggattgtttcggtttccttaaccggagttgaccttgtctgttttgatgaccttccaccactgcttgacggaattccaaccaagtaatgtttttgttaaggaagagttgccctaacaatggcatgtttggtcttatggtcttcaggttctcgaaagttcggtgtccgaccaatgcattgtgcatattcccaggagaggctgagacaaagatatcactatgcataccaacatagtaatcaactgctgctaacaacgaagcttttccttttataaggaccctttcctctgaagaggcaag

SEQ ID NO: 16405 - DNA, 421 bp, Gossypium hirsutum
  Clone ID: LIB3829-018-Q6_N6-C1
gggaagcatgaatcataagctttatattttcgcaatcccaagataaagctggttcgtttttagtccatccaagagaaaaacaaaaataaaagggaaatttttttacgggggcaatctctattcatttggcattttcttgggattcacgggaagaatactggtcttcattttcagaaaacctaataagcgcatatatcctactcattatacagcaagacctggtggagcagcagctgcggaagcctttggcttaggcttttcaacaacaatggcctgagggggaaggaccattcctgcaactgaagaagcattctgcaaagcacattttggtacctttggtgggtcgataactccagcctccagcaagttctcaaatttggctggcatagcattggaaccaaccccccattcactacttttt

SEQ ID NO: 16406 - DNA, 227 bp, Gossypium hirsutum
  Clone ID: LIB3829-018-Q6_N6-C10
aaaatgaagctgggattttatatactatatctatgtaatgtactgattattatattaaatgaaaaatctctctttctccgcaaaagtcctttgtctctctacaaatgtaatcacctaaagtgctgtagattgcaaagacaacaaagctaatggaggtttcttcatacgagggcttgggttttggcttctctgctctgcaacactgtacagggcctgtcttctattaa

SEQ ID NO: 16407 - DNA, 441 bp, Gossypium hirsutum
  Clone ID: LIB3829-018-Q6_N6-C11
gacactggatttatctttatatttatatcatagtatagtacaacaatatctcctcacagtgccataaaaatgaaaccaagaacctcaacaaccgagtttatacaaagaggatataccccaggggaatgagaaccctacaatccactttacctgagttctcttcacaactggaagccttctaccatgctgctactgatgcaataaagctgctgcaattaccaaggacttgctaagcatctgctttggaagcttcctcctctacctcagcctccttaatggtaaccacaggctcaccactcccgccatctttatcatcagggtacctaacaacaacaacagggcaaacacagtgatggacacaataatcactaacactgcccaacttcccatcactcccttttttctcgggttcaaaccctctacttcccattataacggcgc

SEQ ID NO: 16408 - DNA, 501 bp, Gossypium hirsutum
  Clone ID: LIB3829-018-Q6_N6-C12
gaaaaaagttgacttgcattgcattcaagaaaacaagttgcatatttaatacagtagggtaaccatctttacaactactaattgttaacaacagactaactaacacttaactaacactgcttaacttcttcattactaacatacatcataacatgcccctatcaacctcttccttctggggcactctcttctcctttggaaataactcgaagcttgttcctgaatctttcaaataagccaactgatagaggcttagtcaatatatctgcaatttgattttggccagatatatgaccaatctgaaaagaaccatccgcaaccctttttttgacaaaaaaacgaatccaactccatatgtttaaacttggaatgcatcacagggatgttagctatagcaattgtagctgagctatcacaccagaacaatcctttgtgagtaactagagtaccaagttcagatagtaacgacttaacccataccattttagcagggacctgagc

SEQ ID NO: 16409 - DNA, 343 bp, Gossypium hirsutum
  Clone ID: LIB3829-018-Q6_N6-C2
catctattactgatacccgagtatataatagaccacaagcatcaaatgtgggaaacatgacatacattactcgctagaaaataaatagaaacgggtatcaccacaaaaaaaaaagtagaaatgaaataaaattaacacaacatagtggaagacgaaacagtgctaacacaataaccagcagtagggtaaaagttttaggcaaggatttcctccaatggcttggcttcaagcttgggcttctcattctcagcctctttctccttcaactgttgctgctctttggccagcttcttcagcctggcaagctcaagatccttgctcagtcttcctctatacatcagag

SEQ ID NO: 16410 - DNA, 396 bp, Gossypium hirsutum
  Clone ID: LIB3829-018-Q6_N6-C3
aaacaaaactataaataaaatgcctgcattccaatatcatgtaagaagctttcacttcatgtcaccctctgggaggaaaccataaaaacaaaaacacgagtaaagatcaaaaaaagggagtgaagggatgggcaaaaagaaacgagtcatagctatgcttacaataacgagagttgcttataaagcatagaaagctaatcttaaagatggctatcttctccataaccttacttagctatgactaggagacaactttacacaagtccttacttgagcaagagaagcaactactatgattaaggctgttaagtgatttagtcctcatcgtcgacgtcatcatcctcatcttgatcatcatcagactcctcatcatcatcatcatctttaccctttaca

SEQ ID NO: 16411 - DNA, 362 bp, Gossypium hirsutum
  Clone ID: LIB3829-018-Q6_N6-C4
aaataaacttattcactggaattgaaaattacggaaacatctcataaataaaaataccactacaatctagggggaatgatacaagctcaagcaactttatttgtttccaaaaacatacccttttttattaaaataaaacaacaagagagatttataggggggtaaatagacataaacaaggggctaatatccatctaaaaaaaaaacgggggcccataattatatgggtaggatttatgaatcaaagtcaacttttgggcaggtagggttgcaaggataagggcaaacaaactttttgagggggctccgctcataaaaccaagctccaacaggcttgggaatttttatggtggttacatacc

SEQ ID NO: 16412 - DNA, 399 bp, Gossypium hirsutum
  Clone ID: LIB3829-018-Q6_N6-C5
gtggggggtgtataaaaaaaaaaaaaaaaccaaagaggggggtgtaaaaaataaaaaaaattatttaaaacacttttcgggggggggccggggaaaaaaaaaaaaaaaccccaccaaaaaagggggggccggcacagggggaaaacacccgaaaaacccccgggcgcaaaagggcggggaaaaaaaaaaaaagaaggggagaaaaaaaaaaaaccggggggggggggggcccccgggaaaaccggaaaggttcccaaagagaaaaaactccccaaaaaagggggggagaaaaaaaagggggaaaaaaggggggaaaacaagggggcagaaaaaaaaaaaaaggggggacaaccccacaaaaaacaaaggggggaaaaaaaaaggggaaaaggggggggg

SEQ ID NO: 16413 - DNA, 494 bp, Gossypium hirsutum
  Clone ID: LIB3829-018-Q6_N6-C6
cccaaactaagcactaggaatatagatttatataaaatgtaatcttcaatgttttccatgcgagaaacttgctttcactgtttccaccgttcctgatataccctttatagaaatcagaagtgaacatgggggaaaaggcttgtaacagtctaagaatctaccatacaatggtaacaacaaagacagatatggctcactctttagttggaggggctgaaattgtatcctgcttcggcaaagggggatttcaccatatcaagagcccttgaccggggagaaatcttgttcttctcttccttcggcatctccgcataagtttggtcatagccgtcaggctgaaaaataggatcccatccaaagtcattgggtcccctggccggaactattttacccggggtttttcccagaaaggaacaggttcaacatcaggaccaagggcaaaagaaaacgcacataaagcataagctgacttatcctcgtatgccatcaacaag

SEQ ID NO: 16414 - DNA, 472 bp, Gossypium hirsutum
  Clone ID: LIB3829-018-Q6_N6-C7
gagacattaactacaatatatgttttttaaaactttgttttctaaatttttggaaaaggtctcaggatccaggagatgagaagggaggacctaacaacggaaaaaaatggttgggggggagggggatatgacactgttacagagattatatccactgtcacccatctgaagaaaacagatcttctctctttacctcgttgtcctctcagttatctttggagctcttccacattaaggtggaaaacctgtctattggtgacttcatgtggctcctactccaagaaagtcaatgaatggcggtagaatagtctcatagtggctgtagttactgcttcctgccacggatgatgaaggttcaatggctgaaacttgaggtgttattgatgctgtggaatctgtgttactttgggagctgaggaactctgactgttgcattgtcatcatgtgtgaagggtgcagctgctgatgttga

SEQ ID NO: 16415 - DNA, 565 bp, Gossypium hirsutum
  Clone ID: LIB3829-018-Q6_N6-C8
gttgcagaaaacaatttcatgtattgcaataagcacttacagggtttgctcacatccaaaaatatcttgcaccaaacatctggtgattgctaatcttatatatagcatatgacatcatattatatattttttgatcttttcatcacaatattatcataatagctctggtgaaaactctaataataagcctaataaagatggcactcattttccaccatagttgaaaccatggcaaacagagaggacaatgatgaggatcaatgcaatcaatattcctagaacaatcagcttgatcttcatgttttgtagccacatttttcttcggattttcgtcccagtattccagaagtcttgagcctgctgatgaagattctcagttttatccactagaagctctatcttttcccctctatccaacaccttctctatgttctccatcataacacctttgacttcagaaacctgagatttgatcttagcaagcttgcttatttcttcaggatgctcaacacaatactgcatatgttcttttagttttggcccaaattccttgttcaggctgttg

SEQ ID NO: 16416 - DNA, 528 bp, Gossypium hirsutum
  unsure (1)..(528): unsure at all n locations; Clone ID: LIB3829-018-Q6_N6-C9
gctcgaaaaacttacagatttcattatcagaatcaacacacgaggacttccaagtctggaggggcgaaccaataggggaatactcagtccatagtgcctataaactattacaaattgctaatctgaatcctagtaattatttgttacaggctgaagctaaggaatttttcagtaaactatggaaactacaattaccacctaagatcacaatcataatctgacgcatatcatggaattacattcctatattgagcaatctacaacaaagaaggttagtgacaaatgccagatgtccccggtacggtgatgaaaatgaagactgtcatcatatttttcggcaatattccacaagtatagaggtttggcaacttttaaatctatcttggatcacaacttttgcgcatcaagatttctgggagtggctcaccctgatcttcaaccaaggaacaaatgaacaatgcaggcatttttgttatggcttatggatactgnggccttcaaggaaccaacttttgcatgaacgggtaa

SEQ ID NO: 16417 - DNA, 466 bp, Gossypium hirsutum
  Clone ID: LIB3829-018-Q6_N6-D1
gggggaaaaacccaatctataaaaaaaggaaaaggggcccaaaataattagggcattaaaaatttacaccccccgaatcttggcccttggaagggccaaagtaaaacccatagataaaaaaaaggggcaaacatgttaaaaaaacaatctggttggttttaattttggagaaaaacaaaactggaaaccctgagcggcccattgggaaagggagccccacaaaggcaatttccaattagcccaaacacctttttggggggacttttttccggccgaaagaatttatttttttaaacgggtttcccccccggggcttgggaggcaaaaaatttccctttattcaaaatgcaaatagaaatgcaattgcgcctcggggattatccccaaaaaaacacaaggaaacccaaaagatatacgcaccctaaaagggctttccaaagcaagggggtagggggttctcccaaag

SEQ ID NO: 16418 - DNA, 359 bp, Gossypium hirsutum
  Clone ID: LIB3829-018-Q6_N6-D11
agaatgaaagtaggaaactcgacttcataaaatgcataaacaaagcaaacacatcaacccagcgtctattagagattagtttgtagagccaaaatagtgggtcaaaattgtataagctttagaatttagatgaaagcaaaaagcgtgtattgagatccacccaaagatagatctttctcccctctaaagtcattgcttgaaacagctaaatgttgctcttttgatacaggggatcaatttctttctcaacgttcaaatctcgtgggccttgaatccaccctccatcaatggaatccataggtccattcagcccatcatccaagaaatccccaacccgtttcactttaacctcccttggc

SEQ ID NO: 16419 - DNA, 532 bp, Gossypium hirsutum
  Clone ID: LIB3829-018-Q6_N6-D12
acgaaaattcatactatcatatctatttccacaaaagaggtgcttggctcaagagtgagctacaaacatgagcgccacttgaaaataaatgagaaaaaaagaagcatagcataaaccatcatacaaccgttacaatctgtgacaacagtaaccacagcttttatgaaaacgacagagaaagggaaaatggtcctaaagttctaagaaccaaagctttgttccacttttctctcaactttttcacttgtattccaaaatcatgttgttttcaggagccaagccaatgctggcccttagtatgttctccagcattgcacgctgcttggacagtgcgttcaccaccggtgtgcctggtggaacaagaggggctttggtgaggtaactgaggattgtagccacaggatggaaagtgtggaacttgccctctccatcagccttgaactggatcctggtgctaagttcagcaaggagaaccaaatctaggataatgggagcagccaacagggaatcctcacatgtgttgtgcaacaca

SEQ ID NO: 16420 - DNA, 544 bp, Gossypium hirsutum
  Clone ID: LIB3829-018-Q6_N6-D2
gattagatcgttagcaaaagagccagtatattttggtgtttgcaatatttcactcgaagtaaccatcgctaagctggcatacatatacttttgcggacttgctgccatactcggagtgaatactgccataaacacttcctccgtcatcacatttcccacctccttcatatacatatcataatcatacatagatgacataaatacatatggcttatatcacataacatgcttatatgcataatttgtattacacttaattgggagttgcaactaattatcatgcttttatatctactcatacgtacttagatactaaatttatagttttccggcccttacaatgctgttggaaccgaatatcaaattccttaatggacacttaattgggccccaaaattagcccaaaaggcccacacggccctattacatacgtgatgctaagcagtaggtgaggctatgccgtaggggagatttgacacaggaaaaaaatataatcttcaggacccagagcattatcttggtttgcctaatatggaaggaagaa

SEQ ID NO: 16421 - DNA, 431 bp, Gossypium hirsutum
  Clone ID: LIB3829-018-Q6_N6-D3
aaaaccaaaaagtaaaatccattcattcaggacatcgtgtgtaaaatcctaaaccaaatcccatgcagactttaagtaggaaaaacatagttccttacacatataatgcagacactgaaaatgaagagtcctaacatagttaatcgttctaacaaaactggtgaaagcaaggaagacattggttgatatgctcaaataataccaatgttgttggccacattcaacgggtttaatttgatcccatcactaacatacgcattcatttttaaaaactgacccgttaattttttcacctgaacagtcccatctttacacaaccttttgcaaggtaccgattttcctgtttcaacttcatgagttctgaaaattatgaacagataaggaaaatccattctaggaatacctgcaaacagtttaccagaatgagcata

SEQ ID NO: 16422 - DNA, 526 bp, Gossypium hirsutum
  Clone ID: LIB3829-018-Q6_N6-D4
aagccctaccaaaattttgggttaaaaatgaccgaagaaaaatctgctaaccaaaagagaagaggagaataatcttgcagcaagcaacgcttgcaaaggaataggaattaatcttcaatcaactcaggcagatttaagcttggcagatgtagcagccaaatgggaaaggactctatggccaaccaacacaaggataactcccaagaaaccaagtagtttcagtgtttggaatagatccaacttcaaccagaagagcacatagagagacagaactgctccaatactgacgtggaagagtgtggcaaacgtggccggtacggtattggaaggaaagttcttcaaatttacccccaatcgtaatagcccaatcaagaatccaagtaatggcaagaaggtaagacccaggaaagcaagagaaagctccttagggggacgcttttcaggagccctgaagatgtgagttatttctgctttgggcccatatcttgagtaaggatcaacaggctgaggaggagggcgggttgcc

SEQ ID NO: 16423 - DNA, 414 bp, Gossypium hirsutum
  Clone ID: LIB3829-018-Q6_N6-D5
aattataatgcagctcttttaacaattcaactaaattgtccggcaattttggggttcaaaattgcaaaaaaaaaaaagagaaggttatcagacagattcatggctaacaatccttgatgtaaactttggacaattttcagatgctgcactccaaaacgcattcagttatgaatccaaaatccagcacgggagagatcgaactctacatttaaggtggaccccacaaccttgaccggtcttctaaaccataaacctgattccggtagcctagcccttccacactagccactgtctgcacgacctaaaaccggccttgaaccacggcccccgaatcaacgctgataatcagcagcctcaccacccttatgaccaaattcaccatctccttgtggacctacacggtatccatgcctg

SEQ ID NO: 16424 - DNA, 415 bp, Gossypium hirsutum
  Clone ID: LIB3829-018-Q6_N6-D6
aggaagaaaagcgaagtgggaaattttattttcatctattaccgatacccgagtatataatagaccacaagcatcaaatggtggaaaacatgacatacattactcgctagaaaagaaatagaaacgggtatcaccaccacaaaaaaagtagaaatgcaataaaattaacacaacatagtggaagacgaaacagtgctggtaaaagttttatgcaaggatttcctccaatggcttggcttcaagcttgggcttctcattctcagcctccttctccttcaactgatgctgctctttggccaccttcttcagcctggcaagctcaagatctttgctcatcttcctcctatacatttcaaaaaatgggatgggctcctcaaggattggtttctctacctctctgatcttcaagggatac

SEQ ID NO: 16425 - DNA, 417 bp, Gossypium hirsutum
  Clone ID: LIB3829-018-Q6_N6-D7
gatagaaattcataatcaaaatagatgacaaacgccacacggttttgccttcatttgtagagcatgaagttattcgaatattatcacaatagcacaacagtcaaacaccataatcattggggaagcgtcaaagcgcttcacttgagcagccccttagacttcaaatattccacggtttggtcgtagatttcctcgatcccatacttaaagctgaatccttcgctaataagcttctctgaggaaatgatcaacttgggtttggaggggaaatctccaaaatcggtagggactttgaagtcagggtatcttttgttgaggaactttgctagttctggcacactggtattgacagcactgcatatatatcgacccgatgcagattctttttcagccagaaaaacatgggctcggcattcg

SEQ ID NO: 16426 - DNA, 539 bp, Gossypium hirsutum
  Clone ID: LIB3829-018-Q6_N6-D8
gatagaagcttgaagtccactcattttcttatcagtagtgaaagatcagttgcaagttaactctcaagtaaaaacttcaacacacaaccatgttgtctgaaaacctcatcgtctaaaaagcaaaaaccaaatactcaaggaattaattacggatctcacaaaacaaaaactgactaaaccaaagttcacttgccacccttcttggcggcagacttggtcaccttggctccagatgggtccttcttctccacactcttgatcacaccaacagcaacggtctgtctcatgtccctaacggcaaaacgtccaagtggagggtattcggagaaggtttccacaaccatgggcttggtcggaaccatcttaatcatacctgcatcaccattcttcaagaacttaggctccttctctagctccttaccagatcgtctgtcaatcttggtcaagagctctgcaaacttcacagcaatgtgggaggtgtggcaatcgaggacaggtgcataaccatttcctatctgtcctggatggttcataatgat

SEQ ID NO: 16427 - DNA, 362 bp, Gossypium hirsutum
  Clone ID: LIB3829-018-Q6_N6-D9
gcagaacatagtaaaaggcaaaattatatttagctttataagaggagcaggtacagaagaaacaagagcattaacactagcctttccctcgtctttccttttttctcatcattgcctagaccattgctaaggctggggtgggcgctaagaccctcatttgagcattactgagagggctacagtcaatactctgctcttcaccctgttaccacggcctgtacgaataacccgaacatggtgaacttccccagccttccggaggttgactacctcgccgtgcgcctatcgtatgcctttgggtcgtcgggtcggccccttggttctcttctgccccctgggcaccgtgggtcggtcccttcacc

SEQ ID NO: 16428 - DNA, 306 bp, Gossypium hirsutum
  Clone ID: LIB3829-018-Q6_N6-E1
gatcaacggcacagcaaatatattataggcaataaaccatataaatccacaaaatagcacaggttgaacagtagtgcaaatatccatgatagagcttagttactgccgattgctgcttaatatgctaccattgacccattcagggtttcttacaagacaataaccgataagcaaaacaaaggaaagctttgtttcaccagtaggaagtagtcccccaaacctaaccctctaaaacaaccctgatatgtaaacctagagctaactcatccttacagctaggaacacaagacagagatatttaatccc

SEQ ID NO: 16429 - DNA, 224 bp, Gossypium hirsutum
  Clone ID: LIB3829-018-Q6_N6-E10
acagaaaattattattttattactatgatgcaaaaaacatgaatgtgcatcatgttgtccaataatacacctatatatttgcaccgtaaacactataataaactttttaaaaaaaagtgtcaacgtatgagacatataattacataaacttgattactctttcgattttcgggattgatggctttcccagaccttaattcgaaaagtttcccgcttattcatct

SEQ ID NO: 16430 - DNA, 301 bp, Gossypium hirsutum
  Clone ID: LIB3829-018-Q6_N6-E11
gggggggaaaggggggggaaaaaattaaaaaaaaaaaaaggggaaaacccccccaggggttggccttaatgggggaggaaggaagtttttcgaaaaaaaaaaaaaaaccaaaaaagaaaaacacaaaaattgggggggaaggggaaaacgccccaataggaaaacccccaaaaaaaaaaaaaaaacaaggggggggggggaaaacccccgggccccaaaaaaaaagaaaaacccctcgaaaaaaaaccttgggggaaaaaaaaaaaacggggggggggggggaaaacccaaaaaagggggg

SEQ ID NO: 16431 - DNA, 533 bp, Gossypium hirsutum
  Clone ID: LIB3829-018-Q6_N6-E12
aaagaaaaattcagcatgatagtataatactgggagaagccggttgaatgaccgcaaaacatgaatctcaacatgcaaacatgacccagggtacaaccaaaccataaacactcgagaccattccaaccaataacacatctagttccatccgaggaatatgccagtgactactctcaccatattcgccaaaagtacatggcatggaaaacaaacccaacagccttttaagttgaggaagctgcctccccatctttcttctcggaatctgccttttctgtggcttctgtttcctttttctcctctccagctttatcctcggtcttcttttcatcaacgctcaacttctccagcagtccagcagcagcagatgcatctttattttcctctttcggtttttgtgattcagcaacttcttggaacttttgcatgaaggttttgcaatttttcacagatgcaaaacgaatgcagaacagatcatctttcaattcaccatcagcgtagtcagaagcgtgccacaggcacgatttgtcgtt

SEQ ID NO: 16432 - DNA, 272 bp, Gossypium hirsutum
  Clone ID: LIB3829-018-Q6_N6-E2
gcagagcaaaggctaaaagccaaaaatcatccattgcacaaaaaagtttaaaaaggacaacacattcatttctttaattcattctaatcttaaactctgctacaacaaaatttatcctaagatccccttgacattgcacatgatttaattcatgaaatttgccatggtgggatgtggcatcacaagccttatcactcggaacggcttaaaccgctgggcgcgtttcctccagcttgcaaaggaactctgctgggaatacccctaccctgtag

SEQ ID NO: 16433 - DNA, 517 bp, Gossypium hirsutum
  Clone ID: LIB3829-018-Q6_N6-E3
accctattctaacatacatgaactaatttttaataataaaaggggataaaaattttaacaaatcactagtttacgacaaactgtaacctgacttttaagacaaagaccttacttgtaccggcattttagctatcaactacaccattaaagaccacataaactgaaaggaatgggccaaaaaaattaactcaagggattcaaaaaaaaaaaaaaaaaccgtactttgtacatttgcatagctgcattcgaaatcaaaaccatccttttaataatcgttgtcatcggcgttatcgtcattgacgtgtcgatcatcgtcatcctcgaacggagggtccaaaaccgaaacagggctgcattggtcttcctcttcttcttctacttggaattttttaaaggtcccaacttggaaattttctttggcctctttttggcgtctacttggggaagtcgtctgtgaaaagaaaagtggtgtccgatgagtaaaggaagggcttttttgaagcacgaaatggaaagg

SEQ ID NO: 16434 - DNA, 386 bp, Gossypium hirsutum
  Clone ID: LIB3829-018-Q6_N6-E4
gtgaagaccatgcgaactacatttaacacatatttttccagcattcagctcatcaatagtggtacactgtatttaaaaaaaagacttgaaagaaaggaggtaatatctcatgatggacgtaactgaatccccctttacttcaaaatctcacgagattcggaaaatgagtttgatggaattttagggaattaccacaacatctttctggcactattattacatatgcgtggaagtgttccacaacatcaacctattttataggtgaaaaaacttttggtaagcacaaagatttaataatgatgagtatcgtatctgggctatgaaatggcttcaagggtatctccattcaccaaccaaacttcttaaagaaattcttcgttctcttc

SEQ ID NO: 16435 - DNA, 221 bp, Gossypium hirsutum
  Clone ID: LIB3829-018-Q6_N6-E5
cattaccccaaaaaaccatgggatgactctagaaaattgaataacaaaatgacctcaacatataaaaacggtgtcagaagcaaacaggcaaccaccgaccaaaatgccaaaccacaggtaagcggcaaaggaaggcggagaagcagcacagagcccggaactcgagcgggctaagctctcactcctgcgcagacacggccaccttaaacctcagggcaagc

SEQ ID NO: 16436 - DNA, 245 bp, Gossypium hirsutum
  Clone ID: LIB3829-018-Q6_N6-E6
aaaaaggatatttttacaagccattcttcaacgttaaaatcaagagtacaatataatatagcaccaaatctcccaccatctacaggtattaatttcttaaaggtcgaaagaaactaagaggattaagaggtacattttttttccctttagatgacatgcctatgcccctctagagagaataacacgggaaccataaaaggcttatcctatctgcaccgaaccacgagcctatctacctaagctat

SEQ ID NO: 16437 - DNA, 404 bp, Gossypium hirsutum
  Clone ID: LIB3829-018-Q6_N6-E7
caatatgaactttcttgtttcattgaagatattgcaaatggcacttcagagcacaaaaagaaaaaatgacaagtatttcaattttagaaaataaaacctggaaaaacagcaatttataactttatttttattttttggagggggataattacttttaattgtactctatagtcttcacatacaatacacatttgcagcagtcttagatctcttattaacaagtcgtttatagagcagcaaatgagacctctgatacaagcctggccccccttcccttggcgatgtatagacctatgtgatgcataagatcctgtggatgagccaaagcaccattgatatctttggcaacatgaactggaagatcgaaagttgcacaagcaccagagtagacaatcacatcctta

SEQ ID NO: 16438 - DNA, 361 bp, Gossypium hirsutum
  unsure (1)..(361): unsure at all n locations; Clone ID: LIB3829-018-Q6_N6-E8
gaaaaatgctttcaacttttctattcaccagaaagactaacataattacattcaaaccccatcctgcaaaacatagtacataattacaccgtcaagcaccatggagcaagcgacctcagtcactaatcgaacaagctgcggggtggtgaatcactagcggaggaccaaagtgacagcggtgcacagcaaactgaggatcggggctgtcggagagaagtcatgagggccaagccccatgttgtgagtgggaaggggaaaagatgaaatatcgagaggcagcaaggtcctaactttattctgcgcgggacaanggatcatgttggaaagcaacccacgcgtccgcggtcgcgtgggtcgtccc

SEQ ID NO: 16439 - DNA, 508 bp, Gossypium hirsutum
  Clone ID: LIB3829-018-Q6_N6-E9
ggatgaatccatcaaatgtgcttctgcactccttttcaataatatatatatatgtatataaacactgaagaaattttatctggtatccttacttgctactgatcaaaaaatttacgtatcaaactccatagagcggtaacaagattttgacaaaagagtatgcaagtgcacctgtgaatatgtaactatccactctatcaagtattccaccatgtccaggtattagggagccagagtccttaacaccagcatcgcgcttgatcatcgattcagtaagatcaccaaaaacagatccaaagaagttgagaaacccgaaggctattgcactcactaacgaagctggccagctaaaaatctttgataatactacagaagttgctatacaaccacccaagccaacaatagctccttcccatgtcttctttggacttatattagtaagtggggtcttaccaatggcctttccacccaaaaaagcatatgtatctgctgctattatactgctgaa

SEQ ID NO: 16440 - DNA, 551 bp, Gossypium hirsutum
  Clone ID: LIB3829-018-Q6_N6-F1
aatactaataaagacggcatcataattatgattttgttttggagaatatgaacaagctaacaaacgaaatcaatctggcaaaggagatccaaaacattatgaataggataaacaaactaccttcctttcatttgttacaatgatctgtttactttgctcatatctatatataaaatatatgtgggggtgaaaatagtgcgaggaagagaaaggatgatcatcactagctttaacaatcacagagctcgagagtcaggactcagcaagttaacagccacggccagtgtcatccatcatctgttggagaaagtcgatcatggaggcctggccataaaactattgccatgaaagtccagggccactcgtcatggctctagcttctgccagagatacagccattgccagcatcatctgctcctcgtaactttctggaaccatgggaccaggtccacccacactctgaaagctgcctctaatttcatcttgttgaggtattgcagagatcccaccgctatcttctgtcacatcagagcttgcatagctagtccctg

SEQ ID NO: 16441 - DNA, 553 bp, Gossypium hirsutum
  Clone ID: LIB3829-018-Q6_N6-F10
caccatgaacaaatgctgccagccggcttctagaacaaagagttaagaaagaatgttttaatgttatgctgctactatgcatgatgatgaatgatagtcgatacatataactacggagggaactcaaagctaaagatacgtttaattcacctcgacaactaaacagctgattgatgactgatgtcggactctccaacgatctgttcattttacctgatatcaaggtatagatttcaccatgtaattggtagacaaagaagttattggtttccattacgtcctcggaccctcgggattcgccttagtcccattgaccccaaaaagcgagcaggccaagtgtgggttactggggaaacaggacggtaaggagggtgcatcccaaagtcatcatcatcaaatagatcataatccaagaatctaccacgcaagcgaatggatgaatctagatgaataaagccatcatcgaaagggtcatcaaaagaatcatctagaccatattcatccgcatagatatcatgatagcccggatcaatcacattatcacccaacacca

SEQ ID NO: 16442 - DNA, 522 bp, Gossypium hirsutum
  Clone ID: LIB3829-018-Q6_N6-F11
gagaatatgaccccttcacggttgtaaatttatagcctccaattgcaagtatcgtatgagaaactaatacataagcttaaccaagttctatcaagggacagcaaaattttgtgttggactttcccatacaatattagtttctcatacaatatcgtatgagaaactaacacataatcttaaccaagttctatcaagggacagcaaaattttgtgttgggactttcccatacaatatctggaaatgcaatacatgatatgaacagaaacattttgatgccaacttcaagctgtagtttggccaactccattgttaaactgttagcgttgcgaccgcataaaatcatctggcacaaacacgagatccctccaagttcgttacgtgtgaaatggatgcaaataaagccagtaaccgctcacatattactaaaacggtgctaatttggaattataaaacctttctaccatgttcctcaaatcagcaataaaggattaagtttgaaccctaaaaccaaaagatgtcac

SEQ ID NO: 16443 - DNA, 552 bp, Gossypium hirsutum
  Clone ID: LIB3829-018-Q6_N6-F12
ctctaggaagtttaaatatccctattaataccatactagtacttcaaatcatattaccttatttaagaagctttaaaacactgcaaacacaaacagcatcaccattctccccaacaaaaatccaacttactaataaacaatacccacattcaaatgaaagcagtccgtccacctcttcgactatgcctatcataagcagtgttgaatttgtcgactagctcattcattgtgcttgagcagttagtgaacattgcaagataagtaatcaataatgtgtcgttgtattccatcagaaagtcatcttgaaatttttctgattcaatggcaggtaaccttctgaggagacttgatacttgccttaatagtgaattttcgcaaggaatatcacctttttgcatcccaacaagatagtgatgaagtaccctaattctgctattcaacatcttgatggcactatgtataccagtaagatgagcagccaattgagttgctgctgaacctccatcagatggctttagatgggcaacatgatccacagagatcctctcagct

SEQ ID NO: 16444 - DNA, 478 bp, Gossypium hirsutum
  Clone ID: LIB3829-018-Q6_N6-F2
aaacagaacacgaattaccctaattttatcctcatgtaaacattgcttctaaagtcattttaactgtctattacagaaattaccctaatttaccaccaaaaaaagccaaagaattgataatgcatacgaacttgtgtcttttcatgaccaaaaaaatatgcttgaaaacatgtctaaaatgaaaacagacgaaagcaaatgaaagtgattcagacataaggttactgccattcagaggagggagctcgatctattgttgccgaactctccccgtcattctaggctttcccgctgcaaccttggcaggggttgaacgctcggactgagtgaagagaatcaatatttgcatgaggaaggtgaccatggccaatatgaatgctgacaatgcaatgcccctccatgaggataaaagcgaagactgttggagaaacttgagagccccgtaacccacgatacacgcccaagagcaaacaaccag

SEQ ID NO: 16445 - DNA, 551 bp, Gossypium hirsutum
  Clone ID: LIB3829-018-Q6_N6-F3
gtgtatcaaatagaaataaataaactaaagtgtttatgaggccaacgtccatttacaaaattctgggcctaaattaaacccaaaccgattaacccaaacttaatagcctaacaattatatccaaaatccttaacccaataaacctagcccaaataacccaataatcctaacccatgtacagaattttgggcttaaattaaaacccaagcaatccactcaatacccagacccgattctaatagccaaatccgaaacccaacagaacccaaagaaactcagcagccaagaaacttctggaatatgccagaatagtaccaaagggtcgggagtcccatgagcggttccccgcacggcctccttcacgcgcgcctcccctcgttcctctgtacggtcgaacctagatgcaccaacgagatccttgtttccttcgttgaaatcggagtttgaaatggggatttcagagtgaaaacatgccatgagtttagatttgagggaaataaggggcgcctctgcatcatccaccaattttaatggtgaactgatggttgaat

SEQ ID NO: 16446 - DNA, 552 bp, Gossypium hirsutum
  Clone ID: LIB3829-018-Q6_N6-F4
ccagaacaaaattcttaaatgctcctctgagtaactcaccttcacttacctggaggagtatttggtcgtcaaaaaaactcttgacagatggattatgttggagggttggtaaaggtgaccatatttcagtatgggatgatatatgggtgccgaaaatggctttagctcggatatcgctaggaaaatactacagattccgctgtcaaagtcaattcagaaagacatccaagtgtggagaggggaggcaactggtgacttttccgtaaggagcgcctataaattattacagaaagctacaattgatcctagtgtttatttacagaccgatacaaaaaatttctttagaaaactatggaatttacatttaccctcaaaaatcaagattacaatttggagaatagcttggaactacatttccactttttcaatctgaaaatgcggacagtgatggctgaggatcgatgctcgagatgcggtcaggaaggagaagatagtttccatgttttctatctgtgccctgggttttcagccaagggacaaatgaacagtgca

SEQ ID NO: 16447 - DNA, 284 bp, Gossypium hirsutum
  Clone ID: LIB3829-018-Q6_N6-F5
aagcctatatatattatgtatgtgtagatgcatatataagacaacacagaaacgatagattacccttccaactcaaaaatggagctttgccccatcttggtttctttcccggtctcggatacaacgaaaaagatgttatatagacttgaacctaatttctttctataattttagacactatttgcgcttgactatgttgtcttgttgtttgtgttgaaaatgtttttgcagctcattagtttcatcggcaacagtatcttaacaaacacttcctcccttcgggg

SEQ ID NO: 16448 - DNA, 546 bp, Gossypium hirsutum
  Clone ID: LIB3829-018-Q6_N6-F6
cagaaaaatgatgctctttcattcattccattaaaactgcaatgtctgatttttttttccagttacttgctagggtttgttttattttataccaaaaccctaaaccttacagtgtactgacactacacacattcatgctgaagcaaaatcatcaaagagtacaatactagtcagtagctagaacacttccaggccttttctccgatcggggttccaggaaatcccaaatatctgttcattcaaccatctgcagcgtaattcaaatgtgggtttcggaggatcaactatggagtttgaaactcaccgtgtggagaatgagaaccagttgtggagaagtcagatgatgccatcggaatggatatcgatagctgtgttgtagaaaatgaggtctggttggatctgtcatcttcaagagctgaccaggtgtccctggttttaggccactcgtcaaagaacggccgaagagattgaccctcgggcttcacagtttctcccgagttgaaatcgctgaaaaacgaatgctgagggtaatcattcagtaagacc

SEQ ID NO: 16449 - DNA, 548 bp, Gossypium hirsutum
  Clone ID: LIB3829-018-Q6_N6-F7
attgaaacggaatgcactctatcttaaatttctggttgttatagaaaaacaaatagttacaactccaaatgccatgttgaggaaaaagaaacagcggttaaaggatggttgaagatgaatgatttaattgagggatgccatgccatcatcaatcttaggattgcagaagcagaagaatgtcctagtctgacagagttgggttgggtaaatagactaaggtttatgaagcactcctccagcaatcaggggagacttcatgacaacagagatgacatgaatgacttgatccacttggcatttgttacccttgaaactcctttctccttctttctggaaatcctttatgcactttatgaagctttggctgcacttttgactcagatagtcattgatcatagcttgaacgcagtcatcgtgcttcatacagcaagcataaagttcatcggaaggtttctctccagggcatccactgtacaatatgccgtcatacttgccatacctcaaaaatggaagcactgaacagaactctgactcacatgtcctactgc

SEQ ID NO: 16450 - DNA, 545 bp, Gossypium hirsutum
  Clone ID: LIB3829-018-Q6_N6-F8
cagcttaactaaaccatatatatttaggaacctatcccagcaaataaacatcaagaaaacaccggtataaaccgaggaactctttaaagattcacgaaccatcgatgtttaccacattcacattgtcgatctttttcatgcacaaagctaactttgttctggtttattcagccgaaacttccaaagctttgtgaatggaaggataacttgcacaagaaggcatgttaggagggggagtacgaatgcttgtttccggattgctgccattcttcactatcagaacagtgttcattccccaaatcaaatgtctaccttcctggcagtgcattgcccacactccaggattgttagctttaaatctgatcgtcagccatcctttcacagggagtgaagcagtgctgaggtaaggtggatcaactagattataggtttccgtatctcttgtactgttgaaattcccataaccctctccgagtacgtaaaatttatgcccgtgtatatacatagaatgctcatccgatgcgttcaacagatttgttgactga

SEQ ID NO: 16451 - DNA, 412 bp, Gossypium hirsutum
  Clone ID: LIB3829-018-Q6_N6-F9
ctgctcataagtcgtagatagatgatactacaaatacattctgatcaattttgtataaccaatccattgataaaaccgaatgctgatgctaacaaaattttgaagagaaaatagctgactaaaatccatttttggcagccaacgcgaaactattttagtcaataatgatttgatttaacttgtagaacaagaatcttgagatatcattccctccacatatctgcaaattcatcaggctccaaaggattagatagctcgtgcattttccgccttgtcttagctttgactttcttagcatacttcccggctttctgccttttctccaatgctcggatctggtttggtgagacatagaagggattctcatgtagcgttggacctccaaagctaccggcgaatatcttactaggat

SEQ ID NO: 16452 - DNA, 501 bp, Gossypium hirsutum
  Clone ID: LIB3829-018-Q6_N6-G1
aaaagaaagcttgatttacaatttctaccaagaaacaatatcacagaaagtcttagttttactaacactacatttgaaagttttgtttacaacaatatccacagaatatttttggcatttgatgaatgtctgctaatgtcaacaaaatccttttgggttcctaatattaccactcatgcaacaaatttcatgcatcgagtatcgttatgtatattttggcatcggcacgaacaaaagcgcatcccacatgtcacacatgtatactttgcactaaagccgcaaacgctgcaaaaatgccggcgggaggtagaacttggaggtcccactgctgccctcaaataggatggaacatgaggaggtaaggactctaagtttgcctcatgtaagagctcaagaaatgatctgggagccttcctagcattttcaagtgcttttgcctgtcgggttttacgttttgtgcccttcgatctcttttgcatgtatgcttgatcatcttcatca

SEQ ID NO: 16453 - DNA, 506 bp, Gossypium hirsutum
  Clone ID: LIB3829-018-Q6_N6-G10
cagtatcaagtgtgcagccatccatgtggcgaataaaatattcctgtgaagcataaggaccattggatgagatgttagcatgaaaaactacatattgcatgtccgtgagcgtgcagacaatgtcaaacatgagcttagctcgatctttgcaccggacagtaacaaccgagtatcctttctcctcacagcgctcaactgtgatctttggtttgaaggatggaggatagtcaacctcagttgtcactccaccaccttcgtaatccctatcaccaaacagcatttgatgaagccggcgatcaatatgagtgaatcccatggagaagctggtacgagccacattgtcatcgtcctcacaaccacacatgatgtgcttaagctgctcctccataatagacaggctggtgggatcatccacagacccactcgtggtattatcattgacatagagcacacatgctattcgactattatgtggccatacttccgcaacagtaacattgaagtga

SEQ ID NO: 16454 - DNA, 521 bp, Gossypium hirsutum
  Clone ID: LIB3829-018-Q6_N6-G11
cagagaaggaatgatactaattataataatatatatgttttatcctcagcttgaatgttactgttacagtttacaagttaaaatttgggataagtaacagcaaattaccattacgaataatgaatacagaattaaatgcacacaattgctatggtaaaaggtgaaacctattcaggggtgccagtaactacacgatgctccccgattgcaatacccgctttcgtaaaatttacagacccgttgccctttgggcggaggtctgaatgaaccaactctgtttggaggaggaccaccaccaccatatgatgagtgcctattccatgaggaccttcccctgctgtgaaaatcacggtcccttgtatcaacatacctttgttggtccctcggatcgacgtacctctgttggtctcttggatcgacatacctttgttgatcccttgtatcgacgtacctctgttggtttccgaaatatgctggatttgttgcagaagtgcctgaatggatgctactacgattttcct

SEQ ID NO: 16455 - DNA, 515 bp, Gossypium hirsutum
  Clone ID: LIB3829-018-Q6_N6-G12
agaggctgaaaacataggtaattgtctgattttatttggagtccagctaggaaatttgtcatagccgtcacagtagaagggatgaaaagacggtgcaaattaatgaaagttgaaagaaaaaaacacaggaactatagtagtaataaaaacggtgaaaaatctacgtgcatggagggcccaaaccactgccaagtctctttttctcttcagtctcttccaccaccgcagtcagtggccccccatcacctttcacaagactccatttcccagtccatgactcgttgtttgatttacatggtgtgagtgtccactactctaaatcaactccatgggtgaatggaacccattgaagcaaacttggctagcccttgttgcaacaacggtctgcttgattcacctcccacaccaagaaaatccctggttaagctcaattcaacttcatttgaatttgtgttattcagcttcgatgcaagtacaaccgcttggccaccttgttttcctttgctgctggcgtt

SEQ ID NO: 16456 - DNA, 547 bp, Gossypium hirsutum
  Clone ID: LIB3829-018-Q6_N6-G2
gaacaaacaaaattttatatttaggtccactaaattcgagtcatagacacgtctacctctgacctttttaagcagattgaaacctacaacctacatggtaaagcatatgcaactaagtaacataacacaaatattacatcttccccggaaaaaaaaaacatcaataaagaacctacgaagacggactcagcactcaaacagtcaaagctcatatccactgctgaagaaggccggtgccagcataatcaagtagaccatcgactcatttagctgcctactgttgtagttgggtgggatcagttgaaacatcaaaaccaggaggaatgaaaacaacatcatcccaattcaacgtagaagtgtctttcattcccttgattatgtcctcgaaaacagcaacctgaatatccccaggtctaaaggcaggattcaattgattctggtcacgggaagctctcagaagtgattgctctaaatcctcctttcgaaagaaaactggtcgatagctcttattttgacttcttagtaccaagctcctagactggaaaac

SEQ ID NO: 16457 - DNA, 523 bp, Gossypium hirsutum
  unsure (1)..(523): unsure at all n locations; Clone ID: LIB3829-018-Q6_N6-G3
aagaattgagaaagcaaaatcatataanttggaacaacaaaaggcaaacgatagttttggaacaatctcacatcattacataaaatagaaaaagggttttctttttcaacccaatactactataatacgaggtctagaatttgtaagtgcaagttccatcatcacttctagccgttggatcaaagttatcagcatttggatcagtgcacccttcgggaactggaaccccaacttgttgtgctgctttgccatagaaagttcctctattgatggaatcttcattagcttcaccgagggcagcttcactcaagtatttgtcagccaattggactctcttaacattctcttgctcagcaacaagcatgtttccatattccaatagcttttcaatggtcatttttggctgctcaaatgttggaggtccttcccttgagttcactaacttcttccctacgcttgcgactccgacctcactgatccatttcctcactttgtcttcgtaaacccgagccctagggcaccg

SEQ ID NO: 16458 - DNA, 448 bp, Gossypium hirsutum
  Clone ID: LIB3829-018-Q6_N6-G4
gatagaaactattaatatcaaagctcaagtgtacaaaggattaatggtttctatcaataacatgaaaaagaaaaagaaaaaaaaaaagaaaactcaactcttaacactaacaagggaaattctatagttagatgcccaaagaagatcaaagagaaaaaaagaacatatgatggttcagtttcaagcattaaaccatcaagcaaagggatatatatataccagtgcagtcccctattctaagtttttaacaccattagttagtatttgcattatgaaccagcaggatcttcaattggtggagcttgatttacttgatcggaagatttggtacccgagtttacttgattcgatagaatagaatccatttgatctattataccgggggacgggttttccgtcttatctggtggtggctcaacaatatctgtttggcaggttgcaaggttgg

SEQ ID NO: 16459 - DNA, 508 bp, Gossypium hirsutum
  Clone ID: LIB3829-018-Q6_N6-G5
aaactaatagttatcttattagcaatacatttagagaacaaaataaaaacatactaacaattgagtaactagtttacctaatgggttttaaccattaaaactcaattaaaaaaatattagcaccgacaacacgtagtcgtacaacaagggatcgaatgaagaacattaaactaggttttaattactcttagagtttcaaaatctaaaaagtaatacacaattccattgactaatattaattagattgaagaaaaagggggggtttaagaattatcttgagatgaatccgaagaagctttctcagatatgttagggaatcttggaggaagtttcgttaatggttcatcatttgaaactacaccttggtaagctaaccccagggcataccctaatgcccttgaaactggcactgctacagcatttccaacttgaatgtacctttccttgacggggccaaaaagcttgtagtaatcagggaagccttgcaaccttgcgttctcgcgaattg

SEQ ID NO: 16460 - DNA, 540 bp, Gossypium hirsutum
  Clone ID: LIB3829-018-Q6_N6-G6
aatcttggctactattctattcaaatttgagctataaaaaagttttgtgcaatgacagccatccataaaggatataatttaacaagtgtgaatagcctgaaagacagaagattggcataaattgattagatacatgaaagcatcccaagctaacataaacataaatggggttgttcaggaatgtaaccacaagcgatcatgaagccgctcttccccagcaccgaacatctcgtccactctttcaccatctcgataaaaatgaaacgtaggagtgtaacgaatatgctgcgttgtttcaggacattcatcaatatcagcatacacgaatgataagtttgggaactggttgctcaacttgcaaaatgcaggaagaatctggctacaaacaccgcaccatgaggctccgtaattgataaccgtaggagttttagaggttttgacacgaagaagaatgtgcttaaggttttcatcgctggaagcactcttcaaattgccatgcttattgggtggcagatccaagcctgtgccttccaacccttt

SEQ ID NO: 16461 - DNA, 554 bp, Gossypium hirsutum
  unsure (1)..(554): unsure at all n locations; Clone ID: LIB3829-018-Q6_N6-G7
gaaaaaaaatgtgttctattttaaagctaaaatacatntagctgctgctgtatttaacaacagttgacagtcatatgatcatcttcaacccagagctacttcatttcctcttgccgaacaacccgagttccactcttcgatagtagtagatccttcatttctctgtagctgttgagctcttcgagcgcatctgccgttttacgcggcataaaaaatccagaagcgatactgacacctccctcatattcagtccttaatgaatgtgtcgaatagcaactcgagtcttgtcggagaggcggtgctgttctaagcatttgaacaagaatgccaacagcagcatcttgtgattttttaccaaccagatttgactgtgcagtgaattctgaagcctttttcccctctgtgttttgactggatgaatcagatacatcgacatcatcaacatcaaaagggcaagagaactcacaatcatccatgtcatcctggaaagatagtctactagagcttctagagaatccaatatgaggtgatccactagaagacaacaatgcaga

SEQ ID NO: 16462 - DNA, 513 bp, Gossypium hirsutum
  Clone ID: LIB3829-018-Q6_N6-G8
aataaataagaatatatacaattcaagaaatccacttccccaagtcagagatacattcaagcaaaagcttttagaaaagaagccacaaaggggacttctttagagggtctctgtaaaacaggttttggattatatctacattaaaccattctaccaaaatggaactgaacctctctattaacttgaactcgaatactaaacctacttaattaagaacgagaaggataaatgatccacgaatacatatgttacagatatcactaacgaatgtacccccggggggggggggaagaggatattacgatactgagtatctgttagcattggatcgtctgaggttcatttgcaaacggtcttcaacctcttagcagcctgaacgaatcccacaatcacctgcagctcatccatttgctgtgacatgaaatgcctttgaacaatatcgactagttgttctttcgacggattgggaatggcatccacaagattgaagtgtcgccaatatctccataaagc

SEQ ID NO: 16463 - DNA, 260 bp, Gossypium hirsutum
  Clone ID: LIB3829-018-Q6_N6-H1
gagcacacaaaattcacattatactttcattgattgtgcaacaaatttaaattcacaccaacaaataaaaacataaacaagacaaatcccttctcactctctaagttcactttccggggacaaagttggtggcataggcccaagcattgttgttgactgggtcagcaaggtggtcagccaagttctccaatggtccctttccggtcacgatggcctgaacgaagaacccgaacattgagaacatagccaacctaccgttc

SEQ ID NO: 16464 - DNA, 525 bp, Gossypium hirsutum
  Clone ID: LIB3829-018-Q6_N6-H10
aggataccaaagtaaccaaactaggaataattttaagatctcacataaaacaaacttaacagttacaagggaccaatgcacctccattaaagtaaacatgcaatcacaggccaaagtcattaacaaaagagttggttgagcattgcaaataaaatgtggggtggttttttgataaagcattcactcatttcagcagtgtcttgacgattgatttgacgttaagtttcttcaggtctgtatatgactgcccacacccaacgaacataaccggtgctcccgatatgtaaaccattgacaatgctgctccgaccttatcatcaatagtgtcaaacttggtgagcaaaatcccatcaatcaatcttggagtagaagaagtggagaggtcagccaatttctgattgaattttgataactgatcaacagcatcattcccaactagtgcctctccaacaaataagacaaggtctggattattgaggtatattagcttcgaaagggctctcatcaacggttcattatcctgca

SEQ ID NO: 16465 - DNA, 544 bp, Gossypium hirsutum
  Clone ID: LIB3829-018-Q6_N6-H11
aagcagggatcaaagaatctatacaacaatgtatgaaagagtaaatgcggttgtcgttgacaaacaaagctgtaaaattttcagatgtacatatgatacccaatagcaaaacactaatctcaattctccatgtttacacacaactctcatacccaaattctgtgagtagatgttttagcaccatgtcaaatgaaacaaatgtgggcactttgttgttacattttgagaattctcaatccaaatcttcttgcctggtctctgcattatcacctggtgcaggaccaggtccccgagcctgaaacggccaaggcagcgatatcctaaaactcctctcgacagtccgattatccccatcagacctctgcccactattatcaccgtcattaccaccactggtcccttgtgccccgcgaaccctcctctcataatcaggatcatcagtaggcagctcgtgacgacacacggggcacgaattatgcaattccagccacggcaataagcaatccttatgataaagatgcttacagggcatctgcttggcttc

SEQ ID NO: 16466 - DNA, 543 bp, Gossypium hirsutum
  Clone ID: LIB3829-018-Q6_N6-H12
aacaatgtgattagaccatataatgatattgggcaataagtcgctataaagttgaatagtgtgttgaaccatctctaatcttaatttttcttgagaagactagatttcaccaactctttggctaatggagccattcttccacagattcaaagtggcagttgaacatcacaattgtccatcacggatatgtcccaagtattttcagcaatcagatcaaagaagttctaactcaatgggtaaaaacagtgacggaagacatcaaatatcaatccatcattcttcccctcagcatggctgccgctttcctcacctgcctcacgggccctaagatgaataccttgtccggtgggcccttggcacccccaaaatgaatttccgcattgcaagactccttaattgacaagatggaaaccccttttcttccaatgacacgtcccatcttcccttgcggaacatccagaattgaaagtatttcttcttcaggagcatccccctccaccatcacgttatctggaataggaggaatagatggccaatcagcat

SEQ ID NO: 16467 - DNA, 547 bp, Gossypium hirsutum
  Clone ID: LIB3829-018-Q6_N6-H2
caataacaacaatgccattcacaacgccaatggaatgaacattcacattcatctcgtttcaggacgtttctattacattactttatgataaaatttacaaacagctaaataaattgagctgctggctgcgggggatgcaggaaaaatacaacgtactgcagctacaaggaagcaattcagtaggcactcgtataccatggtatttgaggctcacatgataaaatccattttggttctcgagaaccaagccaaccagtttacagcttggtttcaaccattgcaaatacagcttttgctggcttcttcttcagctttaacctaccactatcttcttttactcccttttattcccttttattcaaggacgaattcctgggacaagagggacaactggcttgggtgtctttattttgtctaccattatagcttgagtggttagaactaccccagcaacagagacagcactttgtaaggcacaccttgaaactcgacaaggatctataactcccgcgttgattagatcttcatatcttccagacattgcatt

SEQ ID NO: 16468 - DNA, 193 bp, Gossypium hirsutum
  Clone ID: LIB3829-018-Q6_N6-H3
ggacaaagcatcaaataaacatgtgtttaaataaactacaaagaattgtaaaggagggaagatccaagattcctcctatggtaaaacacgacgataacaggatagcacagctaataagtgctctggcgggatgctttgagtatgatagggatagaatttatcactgcgctgacatagtatacaataaatacaa

SEQ ID NO: 16469 - DNA, 547 bp, Gossypium hirsutum
  Clone ID: LIB3829-018-Q6_N6-H4
actaccacaaataaacgttgcctttgtttttatttcgttagacctcaacataatacaatagatgttggtcatctatatgtcttagactagtaacatgcatctgttacatccgctaacatttctagcctccacccggattgtgaccttcctagtttaggatggaagcatactgtacagacaagaaatgtacaaacaggaatagttcatagatggcagccagatcctgccaacaaacctaaatgtcttttgtgtccttcttgctctggttggacttgggaggctatagatataatctacgaatcatctaactcgatgaggtgtgctcgtctttcagcagcctttttcctaatgaagatgccccatctcagagctgccttaagcttgagccatcccactacggctttgcctgatgaacgtgaagcatcattatcgaaaccgtaagccagggatggggtgggcatatatgttgagggatacggatgagtatcttcaatagcgttaaagggaggaggaggaggagtagcatggcaatggcttcccatgttaa

SEQ ID NO: 16470 - DNA, 502 bp, Gossypium hirsutum
  Clone ID: LIB3829-018-Q6_N6-H5
aggctaggatcaaatgatgattgttattaagatgaaaaataacttcacaatgccagaaaaaactatgatgggtggtgaatcatacaataaaaattggaggaaagagctcaagtgacgctttttttttgggggggggggggcaaggacatgatgtatcatttcctagggacaacatttcatagaacaccaacacttgggggggtaagtcaaaccaagacaagatgtgtacctacgggtaatttcaaatctccattcagggctgggatcatgatgaaccaaaaatgctaatcgggtaaacgtttcctgcaacttttggcgggacattggttcacaaaagatttattatgaaagaaatgtttccaacggaatttgatagccacgtttgcacatcaatcccactacaggctcaaccttatgtcttttaccacacattaagtatgccttggacaatatgagaaatgtctttttagtgggattgatgcggacattattcatctcatta

SEQ ID NO: 16471 - DNA, 463 bp, Gossypium hirsutum
  Clone ID: LIB3829-018-Q6_N6-H6
aggggacaaacgtgcaaaagggggggggagggaaaaagaaaaaaaaaaaaaaaaccgggaaaaaaagggaaggggggggaaaacaccccaaaaaaaaaagggcccccgcccccaacacacacagcaacacacccggacccacaccggcgggggggcgcccaggcacatacccccccccaccaaaacagcaaaaaacccaaaaagcaacccgaggggaaaaacgaacagcaaaaaaaaaaacccgaaaagaacgcgaagggaaaaaaaaaaaaagggcagaccccctggaaaagagaaaaaaaacccccacacaaaaccctgaaaagaaaaaacacggggccccacccggaaaaaacggacccggaaccgggggcccaccaggggaccccagagcgaggccggaaagaaccccaaaaaaacagggagagaggtgaattgggggcaaaattgttaaacggaaaaa

SEQ ID NO: 16472 - DNA, 550 bp, Gossypium hirsutum
  Clone ID: LIB3829-018-Q6_N6-H7
gacaaaaacgcccttgagcattggttgaaaaattacgatcgaagccgaagagcatccaacggtccatgagggattggggcagcagccggagcccaagggttgatggggatggccctgtggtggttctggggtagctgatgatgggatcttggatcaacggtggatgatgcacctactctctcacacgatgggcacatggtgagggtcgtaggtggggtcatttgcatgtagaactgaggagaaagtttcagtgctctcagctcctgaacttccttctgcaaccgcctgttttcctccgtcagattctcacagcatctctttaggaactcacagtcaacctcagtttgcttcagcttggtcctcgcccttctgttttggaaccaaacttcaacttgtctgggtcgcaatcccagctgcttagccaaagccatcttttgttttgggttcagagtgttgttttctttaaagctttcttcaagaatagcagactgatccttcgaaagcctaagtttttttctcgaagcgtcaccatctttctcatcactgatgc

SEQ ID NO: 16473 - DNA, 522 bp, Gossypium hirsutum
  Clone ID: LIB3829-018-Q6_N6-H8
ttttttttttagggtctgaaatttcttaaaactttgttcaattgagtcgaatctgaactgcactatggatgcttatctgtatgcaaatcaaaatagtgtagtttataagtttaaatcggtataaataaatgtaattttccttttaaaaaaaaaaaaaaaaaaaaaaaaaaaaaaaaaaaaaaaaaaaaaaaaaaaaaaaaaaaaaaaaaaaaaaaaaaaaaaaaaaaaaaaaaaaaggggggggcccccttttttttttttttttaaaaggggaacatttttttttttttaaaatgggcccctcctaaaaaacccctgcggaaaaactgtttttttttttaagtttttgacaccttttttaacccccattgggggtttaaacttgggaaatttataaaacttttcccgggtttttacccctaaaaaaaacccctcctgccttcccctttggggggcaatttttttttcccccggcaaaaccaagggtttttgaaaggaaaaaggtctttggctttggttgtt

SEQ ID NO: 16474 - DNA, 520 bp, Gossypium hirsutum
  Clone ID: LIB3829-018-Q6_N6-H9
aagacacaaaaatcggatctccctcctgaccaacacttccccattacaaaatgataaaatgccaatccagaagtaacatattgaaagtttaaaacgagaaagaaaattacaacaatacaaatacaaacacgcatacaaaaaccaatactcgaaacacaacacggttcaggtattactctgaacgatttggcaattcctgtacaattcaaatcaacccttcacgggggccatggctttctgtaaagctcttccttcaaatacaagtgatcccatcttcttaatccggaacagcctacatttacaagtgctttttatcttcaccatcatcgtctccatcttccaacttgtatgtactgaagtgattgaccttgaacctccattctcctttgatgggatcataggagagaaactcagctccttgctcctctgccttcctcttaagcatgttcttgtatttctcgactcgtggcccttctgtatactgctgcctggtctttttatcgaagcatttaatgttgag

SEQ ID NO: 16475 - DNA, 395 bp, Gossypium hirsutum
  Clone ID: LIB3829-020-Q6-N6-A1
agaatccaacagccattcttccatgaaattaaaaaatcacaaactagaattcaaaccaaaagcaacaatgctaccaatattaaagctaaaatcaccattttagtttcaaagccaacaccgtcataccttccggcatggggactcttccaacagagaacaacacatgatccatcccacctccttggaaaataatactcggaatgcgggcaatcttccgtactgaaccatgtacatactaactacatctctagacaacagagcatcaaaataagctccaatgtatggaaaggacccaagaatatcaaaaatatctcacaagggttgtatcacaatgcacattgggcaactagtatgattcctaaaaaacatctgtttttaaagatgaagacaccaac

SEQ ID NO: 16476 - DNA, 562 bp, Gossypium hirsutum
  Clone ID: LIB3829-020-Q6-N6-A10
gaagagtgaaaaaccaagttcagtcacaactataaccccataacagtgacagtatttttcaagttccaaaacagtactgaatcaataaaaaagaacccagctatcatccttctaaccaagccaactcatttttagcacattataggccaacactactaccaactcatgaaacaaggttatcatttaaagacaatgaagccagctgatcagcagctccaccagcttgctgctgttgctgtgctacagtcctcagaacttccattgcttctgcaactttggcttttagagcttctggtgactcgagcaagtgtaaaacctccgtctggtccatctccagaagcatccctgttactttggctgctgcatcgggttccagctgctcgacaagtggatagagattctcccccagcatcgttctttgctgttctggagtagcatttgcaagagctgaggccaaagctccaattggaattggttgagaaagtggtgcatcacgcattggcatgctgcccatatcatatggaacagaaagcatgccctctggaacattaggcatcgaaac

SEQ ID NO: 16477 - DNA, 342 bp, Gossypium hirsutum
  Clone ID: LIB3829-020-Q6-N6-A11
acatcaagtcacttgcaagatctctgtaatttactaaaaagaaaataaactacatagcattgtcttttaagaacgaatggcaataaacattataccaactggaaactcaagcttccatggaacttagtcaaactagtcagagtgagcaaaatccagcttggcatggccgtttaacatatcagtagataacagggatcaattacagctgcaggggcttacattgctggaatatttcagctgtcaccagtatctcatttgttggtggagaaaattttagatttgtgttacagcctttacttggaagaaaccttgtcttgctctaagggtgactttataaatttc

SEQ ID NO: 16478 - DNA, 543 bp, Gossypium hirsutum
  Clone ID: LIB3829-020-Q6-N6-A12
agagcagtaaaaataaaaattagtatatatatataatgactaagaccaagagctgcgggctacattttttgccttgatttgcagccgcttcagcccccttaacaacattttaccactagctggactttgtactaactattagcaccacctcaatcaccaacaaaataaaaggaaaacgccgacccaagattacggtgaaaaacaaaagttactacatatgcttcactttaatcactttgctaaactatctatcaccatttttttttttgtaaattccaccgaacaccccccaacccccatttttacttttacccaactacccactacttcaaaatttcctgggaaaataaaggaaatttgaagagctgggttaaaaaaggaaaataataagtgaagatattactaaaaaggggcaagtgtgagattcaaacgcggaaattctttcccgtgaaggtttggccgaattgccaatttgcaggtgccacgttcaacgaagtggaggttcgcctgtcactgcccgtgactctgaacgagagtgcctga

SEQ ID NO: 16479 - DNA, 510 bp, Gossypium hirsutum
  Clone ID: LIB3829-020-Q6-N6-A2
aaaattggagcttaaaatccgggattaccggtaaaatatccaaaatatccatgaacaagtgacaagtataatgaagatctcgatcagaggacgtcgcttaccaatcactaacagttcatctagaacggttttttattcaaaactgcagctaatcctattaaggcaaaccactcctcttccaaacagattatggaaatgatgaatgcattcatgagaggcatgagtaagccaattccttctcctcggtcagctcctgtccggtcaagtccaacttcttcctcgagaattcatcaattgccagtccttggacaattgtccattctccattcttacaagttacagggaaagaatagatgaccccagctggtgcattgtatgaaccatcagagtaaacccccatggaaacccatgtaccctcgggagttccaaggacccaatcacgaatgtgatcacaagcagcactagcagcagatagtgcacttgagagtttcctagctttgatgattgcag

SEQ ID NO: 16480 - DNA, 544 bp, Gossypium hirsutum
  Clone ID: LIB3829-020-Q6-N6-A3
actataaaaacttaagaaaatctaaccatattggtgttgggtactcacacccgagtccaagttacatagttttacagctgagatggaaatagaagaaaaccatatagaataaacagaaatagtctcaacaatggagaaaatttctctctcttcaatttgattcatatcatgtgaactatccaaaacatttcattgagcattatacaggttttggatgattgtgaatgtaataggacaccaaaaagaagtgagaagtatgtatctctacagagattagcttggtctggtgtatggtaattaatttttgtagggtatgttctgataaggctttgaatgaatcagtattgcttttgtatatatgtcaatgaatgaagctgaagctagcaaactgaggttattcaagctggaactaattagtggagattatcgaccggtgaataccgcaatggagcttctcggggttcaaacacgttgagaaattccaataatgttgccatcttcagtccaatgatctggacctggggattcgaatgcccttttagaa

SEQ ID NO: 16481 - DNA, 466 bp, Gossypium hirsutum
  Clone ID: LIB3829-020-Q6-N6-A4
gactaaataaatcaagtcaatgtctcctctattaactttcatgaactcataatacaaaacctgagaattactctgttctataataattcttaataaaggataggataaatgcttttctgtttcttcctatgctgctatatagataacaatgccaagaaaatcatcccctctggaatctcaggattgatgattcttccttttcatcccgacatgatgaatctcatacccttgggaaacaaacattacaggctaagatatttagtctgatgtttcaccggagtggactgagcttgtgcccgatatggatgacaccaatccatatatcagttggcttggtgaagaatatcccatgaggtgatgaagcgatgtaccaccagttggtggcaactcttcaagggacacttcctctgacctggacatagttgaagaaggttcagctgaatcaaaagtttctgttgaagtttta

SEQ ID NO: 16482 - DNA, 359 bp, Gossypium hirsutum
  Clone ID: LIB3829-020-Q6-N6-A5
gggaaaaaaaaaaaaggggggaaggggaaggaatttttttgggggggaaaaaatttcccggggaggggggaaaaagggggggaaaagggggggttttaaaaggggccgaggcccggggggggccgggcccccccggaaaaaaaaaaaagggggttttttttggggggggaaaattttttttttgggttttcccccaaaaaaaaaaaaaaaaccccggaaaaaaaaaacccgccccaaaaaaacccccaaaaaaaaacccttcccccaaagggggggggggaaaaaaggccccaacaggggggggaacggggggaaaaaaaaaaaaaaaaaaagggcccccctggggaagggaccaaatt

SEQ ID NO: 16483 - DNA, 549 bp, Gossypium hirsutum
  Clone ID: LIB3829-020-Q6-N6-A6
tcgcgggttccatttctttcgttaattctcaaaccctgaagctattcccttctttcaattcctttcttcattctaagcaaccctgcattgtctccatataccattattcccataaagtggcactggcaccctccttgtctctccccaaacccaaagatggctcttttcgtcttgctgctgaacttatcaccaactctgttccctcaagaaatggaaattatactgtgggtgattttatgaccaggaaagaggatttacatgttgtcaaaactacaacaagtgtggatgaagcattggaggcacttgtggagaagagagttactggtttcccagtgattgatgatgactggaatttggttggcgttgtttccgattatgatttgttggcactcgactcgatttcaggtagcagtcaaaatgacacaaccttgtttcctaatgttgatagttcttggaaaacattcaatgaaatacagaaattgatgaacaaaaataacggaaacgtggtcggagacttgatgacaccttcaccgctcgttgttcgtgaaa

SEQ ID NO: 16484 - DNA, 586 bp, Gossypium hirsutum
  unsure (1)..(586): unsure at all n locations; Clone ID: LIB3829-020-Q6-N6-A7
acttcaagtgccattaatatattatagcaaaattctcatacatttttgcaatacgacactgatacaggacacaaactcagaataaccaaaaaaaaaaaatcaaggggagaaaaaaggataatgattagggcactatatgaatgagattagaagcattctggggatgaaaatagagagtataggtgagcagcaaggcaatattattcagtactatgaataagcaggcactgagacaggcagcagagctgaacttaagattggggcttgtcccacttgaggggcttcacagcttcccaggtgaagtctgggtcgtcccttccaaagtgtccgtaagcagctgtcttcaagaaccgactattgccacctctcttgaggtccaggttgatggtgatcataccaggcctaaagtcaaagttctccttcacgatttggagtatttccttgtcgggaatctttccggttccgtaactgtccacgaagacagataagggctcaggcacaccaatagcatangagacttgtacgatgcatctgcgggcaagtccatttgctacaatgctcttggcagcctgcctaacaatgtaag

SEQ ID NO: 16485 - DNA, 380 bp, Gossypium hirsutum
  Clone ID: LIB3829-020-Q6-N6-A8
gggaaaaatgggttaaaaaaaaaaaccaatcaaacggaaggggcccaaaaaaaaagggaaaggcccctaagaaaaacaaaccaaaaaaaattggaaggggggaaaggaaaaaccccggggaaaatggcgggggggaggggccaaaaaccaaaaaaaaaggcgggccggggccccaaaaaaaaattaaaaaagggggaaaaaaaaaacctaaaacggaaaaaaaaggggttaaccgcccccaaaaaaaaacattaaaaaaggggcaaggcccccgaaaaatatccccaaacagggaaacccccaaaaaaagggggaaaaaacaaaagtgccagggcccccctgggagcctaaaaaaaaagaacccaccccgcccccggggg

SEQ ID NO: 16486 - DNA, 432 bp, Gossypium hirsutum
  Clone ID: LIB3829-020-Q6-N6-A9
ggaaaaaaaaaacttatttccatttttatgcttttaagagaacaggaacaacatcgatcaaaaacgggggaacccaaaccaaacaggaacagggtaactttagaattaccaactaccaaacccaaaccaaacccataacaatataggcccaagcccactttgaaaccctaaatttaagacccccagttgccttcagatgcaccgccgccttttgggtaacgagatccgccggcaccgtatcctccttcacgggggccacctccgtatccacctccaccataccccccaccggttccgtatccaccttcacggggtccgccaccatatccttcttggggaccaccatatccgccgccgcctccaccgggggtggaaccaccgtttcctcctccaaatcctccgccaccggctccacttttgggcgaagggggt

SEQ ID NO: 16487 - DNA, 565 bp, Gossypium hirsutum
  Clone ID: LIB3829-020-Q6-N6-B1
aatcaaagtttcattgcattcgatgtttctccgatcatttgtctagtctattcttccctcttttctgcttagttccttccattttaactagctttctgactaataagtgtgcctgaactagtgacatttgacaacgtgaggacgccatgcaactcaaatgcagatcatcaaacaaaaatattacaatgaaatgaaataattcaaacccagttcttaatattatgacatccctatcactcttcctttttgtcagctgcatcaattgccgccaatctttcaacaagaggaggatgagaatagtgataagctgagtaccacggatctgtattcatagccgacagattttcttcctgtagcttcactagaccggcacgtaaagcagatccatacccaagcttcttagcaaaggcatcagcctgaaattcaaatgatctgcttacaagattgagaccaaagcttacaaggtgttggagtggtattacagtatgctgaaatataataagaccaattagtaccggctgtgtgtcaaacccaaagcttcggaaaagatcagttgagttcctga

SEQ ID NO: 16488 - DNA, 154 bp, Gossypium hirsutum
  Clone ID: LIB3829-020-Q6-N6-B10
ttttttttttttttttttttttttttttttttttttttttttttttttttttttttgtttggaatgctaaaacaaaataaaagaaaaaaaaaaaaaaaagagggaaagggggggggggaagggaaagaaaagtgaaaagagggggggggagggg

SEQ ID NO: 16489 - DNA, 453 bp, Gossypium hirsutum
  unsure (1)..(453): unsure at all n locations; Clone ID: LIB3829-020-Q6-N6-B12
aagccccaatcaatcatgcgagagccccaaaaaaaaaaaaaaaaagggggggcaaacaaaaaaaaaaagggaaaacacccgggggggggcatatttttttaaatcagtaagcaaacattaaaaaacctgctggaaaggacaaaaagaaaccccgctgggaacccaagggggcccttttggacaaacaccagggccccaaaagagagggaaaaaaacccctttggggggggaactaaacccgaggcaaggcctggctaaaccaaaaccaagggaaatgcaacggataacaacccctttgaaaaaaaagcgtggccgagtggaaggaaacccattaagggggcaatggcccccatttggggggaaaaattcgcccaaattcccaaaaacagttgatggcaacggaaccccccgggggggccccgaggccggaaacncaaccgggagacaccggga

SEQ ID NO: 16490 - DNA, 511 bp, Gossypium hirsutum
  Clone ID: LIB3829-020-Q6-N6-B2
agaacgcaaatcatcagcacattttatttattagtcatcttgttaatcacgtttgttgcatctaaaactgaaaaagtaagtagtgccatggacagaaagtctgaaagtgaagcggaaatcaccaagtcaattcactttacattcaagatcttaattacagatgcagttccaatccgatgcagtgcaacaatggaatccccattttggcagagaccctttgtcttggcatgctgaatagcaaactccaatgcttcccctgttggctcttcatgagaagctcttgcagatccagcatataaaatcgggatcaaaccaccaaagactaagctgtgccttgctggagtttcatcactgcatgaccaatcgaaagaatcagtcttgatctcagggacaactgcggataaaatgggtatgccaggtctgtacttagccaccaattttgcgggacttcctcccctggttaagaccaatataagagctgcttttgctgaatttgctgttctaacagctg

SEQ ID NO: 16491 - DNA, 550 bp, Gossypium hirsutum
  Clone ID: LIB3829-020-Q6-N6-B3
gaagcaacattttcataatctaatattatggtccttcaaggccaattcttgaagatatcaagtgatacacataatttgaaatttaaagtagattctcgtacaacaatataaagcagaaggtaaagtctaaagaggaaaaagagtgcagagaggtcataactggtacaattaaatagccatatggcaaagccataacccaaccaataataacacggagcttccgtaaagccgggctgatccagaaggagtggtgggcgctgcagcagccactgcaactctgggcttttcgggctcggggttcccaaaaggcatcacctccacatgtagctttagaccgttcttgcagctctcttccttgccgcttacgaaataacggatcccttccccatccagcgggatgccatctatgccgtccgtgtacattcttatggggttgctcacatcgcacgactcatattcttccgggctattcacctcagcaatgctctcctgtgctgcggcgtaggcgaaccagattttgtctccaaccctgaagctcctaccggaggac

SEQ ID NO: 16492 - DNA, 563 bp, Gossypium hirsutum
  Clone ID: LIB3829-020-Q6-N6-B5
aatcagaagaggatcactgttataagaaagggtaatcaggataacactaatcataactaaaaccggaacagctttagcacgattgtcatcggaaaaaagagaatgatgttcaacttaaaacattcatatctgcatgaaaagttttccattcgagataaacgttgcataatgcaaatttagaacagtttctaccgtatgtttttgattattaatcatatggaatttggatataagcagcatcacatacaaaaggaatgtcagcgtacataccggcaagtgcacatcttatgcactccaaaatggtgaagaggtaagcaaatgccacggctgtccaaaattgcatcccgaacttaccccaatatattgcgagtggcatccaccggctcacggtccctattacctgcaaggcaatttccaataacatgcccatcacaacatgaaatcggaaaaaatggggccattcttttcttctcactatccctagatatgcaacaaagaaatatgccattaagaaccagctcggtaaacttccaatggctccgagaaacggataggtcaaaaac

SEQ ID NO: 16493 - DNA, 219 bp, Gossypium hirsutum
  unsure (1)..(219): unsure at all n locations; Clone ID: LIB3829-020-Q6-N6-B8
aagttcattggtattatttaagagtatctaagcgcagtaacataatcatatagtttacaagggtcactaaaccttccatcttatggcagataatttaactacactacaagaaaaccttttacgctgngaatcgtngaaccatctttgnnnatgcatacttacnntgttttctggnacnncaaatatataataaagtatttgagttggataagtcggttt

SEQ ID NO: 16494 - DNA, 556 bp, Gossypium hirsutum
  Clone ID: LIB3829-020-Q6-N6-B9
aaaaaagaaaaacaaattatattatacaattttcaaaacattaatgtatgtaagtatctacattggggtttatgtattgaatacacagctttattacaagcattcaacaaaccaacataaaaacgtacataaataaaaagaattcccctttgaatagcaaccaatgcgcattttgggaaacacctgtcgtcggggcggttatgaggagcctgccgcagcactgttttcacccgattttccttcagaggtcgtatcccaaataatatcttttagtccagtggagagattattatagaacttgtgaaattccagggtatcccctccagattttcgaagttcaaccatgcaaagagaaggagccacctgaaaaacctctgttgtaacagctaaatgacccttgcgtccagttttctctccacgaagcttcatcttgtggttatttttcttcacatcaaaacccaagggcatagcagctctctctatttgcgagattatctcattagcaggacgttttgatgtgaatcttgtttcccttttaacaaggcccatttgctta

SEQ ID NO: 16495 - DNA, 563 bp, Gossypium hirsutum
  Clone ID: LIB3829-020-Q6-N6-C10
cataaatgataaagtctatcaaactattattatcataataaaatactccatctgcggaaacttcattaggtttagccagcacggttcacttcttcttagcagcagacttggtgaccttggcaccggttgggtccttcttctcaacattcttgataacaccaacagccacggtctgacgcatgtccctcacagcaaaacgacccaagggtgggtactcggagaaggtctccacaaccatgggcttggtgggaatcatcttaatcataccagcatcaccattcttcaagaacttgggttccttctcaagctccttaccagatcgcctgtcaatcttggtcaaaagttcagcaaacttaacagcaatgtgtgaggtgtggcagtcgaggactggggcatatccgtttccaatctgtccaggatggttcatgatgatgacctgagaagcgaagtttgcagcctccttagcaggatcatccttggagttggatgcaacataaccactcttgagatccttacagggacattgttaacattgaacccacattttcaccaggaagcgcctt

SEQ ID NO: 16496 - DNA, 366 bp, Gossypium hirsutum
  Clone ID: LIB3829-020-Q6-N6-C11
aaaggctggtctgggagtctaaatgtcattgcccaactgggtaattacatgaatgctgatgccaaaaaagtccaggggaaaaaagcaatttttccattttgccccctgccttattcatgctatgctagacctatacaaacaggtggtccactagagagagaacccaaaaatataaacaaattgggaagaagcaatgaccccttatcaaggaaaacacaaattaactacttcacctttttacatatggctaaaagattaggcagatgatattatcctataacctatacaagctgagggccaatttttttggggaaaaaaccctttttttttacccccaaatgcaaatgggattcatgttttactacc

SEQ ID NO: 16497 - DNA, 545 bp, Gossypium hirsutum
  Clone ID: LIB3829-020-Q6-N6-C12
cgttacgtaataattcatgcagtgcctttttatcttttttccttttttgtaaatgaaacataggatgattccagttacaatgctgcagaactttacaatagcaaaccaaaaggcatgaaaatgcctaatgcctaattctttttaaaaatcacaaaataaaggggaaaaaaaataaaagaggatagcattatggaaaagaaagaagggcagctcacatggtgaatctgaatcatccagcaaactgctgccaaatcaaattctcaatagaatctcccttaaaaattgtaaaaaataaaaaatcacaaatccaaagactcttaaccaaactagcaatgtatctgggagaagtcaaatgaatagttttgacttctatcttcaattctgtaatcaatagccggatgaagatactaacacattatgttccttcaagcgcctctggaaattagccaagcgagtttgtaactgtgtgataccggcagccttctgagaaagaatagtggtcaatctcgatatataatcatccagctggttcccaggttgatctg

SEQ ID NO: 16498 - DNA, 546 bp, Gossypium hirsutum
  Clone ID: LIB3829-020-Q6-N6-C2
attcaacaaacttaatttatttcaatctgacccactcattaacatcactaagtaccaagtcactttggagtcttgattaccaaaaaataaaatacaagtaaacctttcaagctcctacatgttagagaaattttaaatgatcgtattgcagaaggacgcaggttgggtcataatttacaagaagccaagaccatctgtcactggaacctaatttaatacttttagtgtattatacaaacaaaacaacgacatgattttcatcaactcaatgacaaccacaaagctgattggcattatccattttctttgctcttacatttaccttttcaattcaagaaatccttcatggggtcatcgtggtgtacctttttcatcctatatgcctccatttcctcagcagtaacctcatcattccatctgacgttatacttgcgttttctttcatctttctcctctcttctcctctcatcctctttcttaagtgcctcagtaagaagtttttcatcaagaaccaggtcctcaggaacctcagttccccaagtagca

SEQ ID NO: 16499 - DNA, 139 bp, Gossypium hirsutum
  Clone ID: LIB3829-020-Q6-N6-C4
cttggacaacacataaattaaaaaaaatggggaaggaacaaattttttttttctacaaaaactacattttctataaaaaaaaaggcttagaaaggaggaaaaaatggctattttctaaccccatgtgccttatcaaaaa

SEQ ID NO: 16500 - DNA, 246 bp, Gossypium hirsutum
  Clone ID: LIB3829-020-Q6-N6-C5
attaaaagaaatgcttatttgtttatttttccactcatcatataaaaataaaaaagaaagggcacaagcaatgaattgaaaagaaggcatatacttcattccacttttatgttttaaaactcctggtgatccaagaaaaaatttcgatggaaaccacccactaacaaacaaacccattaaaccctaaaataagagccgaagctcactcaaatcctaaaacgccttaacctaaacccaaaaaccccc

SEQ ID NO: 16501 - DNA, 416 bp, Gossypium hirsutum
  Clone ID: LIB3829-020-Q6-N6-C6
ggcaacagaagcaataatttatttaacttctactgtaataagttgattgactctgtttaggattcttttttacattattcaacttttactgtaacaagttcgaagggaagaaagtctacacggtacttctcataggcggcttcgctggctcactgaggctggcttaaaactggcaaaaccagtgatttccctaccagttaccaagctgttgatgtcataagtgccttcgtatgtgtaaatgggttccaaatcacagaatgcctttgcaacaagaaaatcggccaaaattccattgccaccaagtaactcccgcccaagagcagctgtctctcttgccattgaggtaatccacgactttcccaggctggcatgaccgggagtcattttaccctcttcatacaattggcaaaggcgcc

SEQ ID NO: 16502 - DNA, 473 bp, Gossypium hirsutum
  Clone ID: LIB3829-020-Q6-N6-C7
gaaattattactcttttttggtaaaacaaagagttggaacagatggtaaatagcataatcagacaacaaaggtcaataatcatccaacatttgattcctatcattccattctcaagctaattcgaaaagaagacggttcctcaagcttgaaagctcttttcagtcaacctcctatttcctcttggccgtttatttacctcggattttaactttaagcgtccaattataccttccttttgggagcggtatggattttggcatccgcaattgcacatcaaacagtccaaatgtttccaaaggtgttggaaggtgcaaattttcaggatcaatttgaacgcaaagctgccttgcaacctcagcaacaatttcattttttgtcacaggtgagcgcaattcaattgggtcatctttggtcgattgggcaccaaacttttcaacattgatagatctcctcaataccagccggccattta

SEQ ID NO: 16503 - DNA, 539 bp, Gossypium hirsutum
  Clone ID: LIB3829-020-Q6-N6-C8
aatcctaatttacattttattacacaatttcattcaaattcctaaacatgatagtttaggaaaagtaaaagaatccacgagtattcatgtcacgcctcaaaccgaggcataaaagacgccacacgttaagagagataaaatctcgcaaatatacaaggctaacactgagtaacagaaacccatcatcttccattctcccacaccaataatatttgataaaagaaatgcttcttaaatgaaatcaatacctggataaaggtacaatgaaagaacaatgaacaaggtttaatatttttttgtaacttcgacgaagcaatgaaagcacaattatggcatttcaactccactcaatttatggattgctctaaccttcttatctgaccaagccagttgcgttctgggctcgttatcagtgcggagctttgggtataatatgcttctaacaacagaaaactgcaaagtcctctgaaggttgaatgtgcagaacagctgaaatggagtttatagtgacataaataagtaaacagtgcagatcatcc

SEQ ID NO: 16504 - DNA, 537 bp, Gossypium hirsutum
  Clone ID: LIB3829-020-Q6-N6-C9
accttactaattaaagcccattagacctttttttccgactttttgacataccctcatgagtttgcgaggccatccaaagaaggctgatttatacaatcaagtaatacaacacaacatctgtcccttgacgaaatcatcaattcatatatgttccatgcatttctcaacaaatcaaatgcgaactcattagatttatgcaataattgaaattgcaaaagtttctgtccaggtatttttttcgtattgcaccatctacagacagccaccccgcagtgcaagcacaagatgcagcacagagccaccctcaatattgtagtcccgcgctgtcttgtcatctgcaagttgcttcccggcgtatataagcctttgctgaactggaggaattccttctttctcttcaacccgttccttgatacgatcaatggtatcagttggttcaatgtcaatttcaatttctttcccggtgagagtcttcaccttgatcatggttccacccctaagccttaaaactaggtgaagagtggactccttttggat

SEQ ID NO: 16505 - DNA, 172 bp, Gossypium hirsutum
  Clone ID: LIB3829-020-Q6-N6-D1
gggttgcaagttcagctacttaagcagccttttttatttgatacttaacaaccaaaactcgaggagtttacagaatgaacaatagtttagtgacagcatttacagggaaacctaccattttgttgaagccacatattaaacagagtaagccttagtccttgtagcaacttat

SEQ ID NO: 16506 - DNA, 421 bp, Gossypium hirsutum
  Clone ID: LIB3829-020-Q6-N6-D10
gggcaaaacaaattttaaaaaaaacccttaaaaaaaaaagaggccccaaggcggaaaaaacccaaaaaggccacagggggtccaacaaaaggaaaggggaaattctttcccccccaaaacgggaaaaaaaaaaaccccccccccgggggggggggaatttaaaaggccaaaaggggaaaatctttccctccccttagcccccaaaatcggggccccttttttttttttgggccccttaaaaaaaagggggggcctctggggcccggggaaccccggaaacacaaaaaattaggggggtctcaggttaggggaaccccatttaaaccaagccccccccgggggcccaaaggaaaaaggccccccccccaaaaaaagggtgggaacggtgcccccccaccccggaaaaacccctggggggggg

SEQ ID NO: 16507 - DNA, 545 bp, Gossypium hirsutum
  Clone ID: LIB3829-020-Q6-N6-D11
aacgccttggttttcataacattaactactctgtttcattcagacaatgaaacattaacatcgtacaaacagaatacttgcattccttcttcctcttctacttccggctgaacaaacttctaagcctccctctctgtaacctctcgaggagcttcttcgcacccgggatttccatctccgacagcttcttcagataccctatcgccccatatgagatcataagcttcttgcatttcttacttgtcgacagcaatgcaaggcaggaaactgcgtacttctttgcggtattttgtggacttggatcgagcagctggactagatatggcacacttttatcgtcctttttgacttctcggcgatttggagatatggttagcaagctcgaaagcgcttgagaagccgtttctctagcattattcgatttagcctcgagcattttaataaggagagtgatgcacccggcttcacccaccagctttttcgtttcgattgagttgcaaacacgacagatggccgccgcagcggctgtttgtgcgcccagcgat

SEQ ID NO: 16508 - DNA, 531 bp, Gossypium hirsutum
  Clone ID: LIB3829-020-Q6-N6-D12
tttttttttttttttttttttttttttttttttttttttttttttttttttttttttttttttttttttttttttttttttttttttttttttttttttttttttttttttttttgaaaaaaaggaaaaaaattttcttgggccacaaaggggaaaaaaaaatggggggcccttggggggcggccccccaaaaaacaaaaaaacacaaaaaccaatttaaagccttttttggggccatttttatggggacttttccccccaatagaacccttttggggggtttttaacctaaaaggttttattttttaataaaaaaaagggttaaagggacaaaaaaaaaacgctttttcaaaaaagggtaatttttttaaaaaaaaggggcaagaaaggggggcctgaaaataacgggccgggaaaaaaggctaaaaaggggggggggtaaccaaaaaaaggactttcctttggggccggggggaaataggaaaaaccgggttttaaaaaaatttggaaattttatgtcccgggggggag

SEQ ID NO: 16509 - DNA, 420 bp, Gossypium hirsutum
  Clone ID: LIB3829-020-Q6-N6-D2
gcaaaggaacttattattgccataaatttaatataagttggtacatgaattgaataggcgttaagcttcccgcccacaccatcaaagtgttctagtctttaacaataaacacacaaattcataggatttaaataatctaaaaaaggaaaaaagaagaagataaaactgcaagccaagtggagcacgaccaattacttaaaaggcatgtttgtttaactttaagcagcaacactatggagcacaacagtctcaacagtgaggccaggtccgaacccaaagagcactccccactccagtccttctgctgttgtctgaagcccatcttcccttgatttcttcctcatcttatccaaaatgaataaaacccaagcacttgagatgtgaccaaactctgaaagaacgtgacttgtgggtactacc

SEQ ID NO: 16510 - DNA, 512 bp, Gossypium hirsutum
  Clone ID: LIB3829-020-Q6-N6-D3
catgaaaccgttaaaattccacagaatttcattaatgatttgcagagactgcaaatacaacaaaatgaacagaaagtacagatttctaattctaggaatcaatcaactaaaaactaacagacctaagctctctctcctttaatcctcctagcaagttggatatctttaggcataatggtaaccctcttagcatgaatagcacacagattagtatcctcgaacagtccgacaaggtaagcttcagcagcctcttgaagagcggcaacggcactgctttggaatctcaaatcagtcttaaaatcttgagcgatttctctcacaagcctctggaatggaagctttcggatcaagagctcggggctcttctggtacttcctgatttccctaaaagccacagttcctggtctgaaacggtgaggcttcttcactcctccggtcgccggtgctgacttccgagcagctttagtggctagctgcttacgtggagccttcccaccggttgattttctagc

SEQ ID NO: 16511 - DNA, 489 bp, Gossypium hirsutum
  Clone ID: LIB3829-020-Q6-N6-D4
attctcgatgtgcaaagatcaataactcgaaattggagttttacatacccttatcgaactaccatcgacgggtacttatacatcggtgttatggaattgatcctcaaacaccgtgaacgtgaatggatcgagccgagtgacaagttgcagcgatgaagcttccggcggctagaagcagacactcgttacatttgatccattacctgattatacactccggattgaccataacttaaaaacgatttgcgagcacgaactcttagttcgcaacagctgaaaaatatacaaaaatcacaatagttcgattcttcgatctacgatgtcttactttttaagttcaacgatcttcaggattcatcaattccgatgtattgggagtgagaagccgccaggagggctgccccgatgccggaaccatcggtggaatgttcgataatgatgttttcggagacttcttctcctaaaactccgggggggggctctccatgc

SEQ ID NO: 16512 - DNA, 365 bp, Gossypium hirsutum
  Clone ID: LIB3829-020-Q6-N6-D5
gcatgctctacgcttgatatatatttctaaaccaaaagacaaaagcgcagttagttcaatcaaatattcagcggctcttggagtacaactctccagtattctacaacatgattccaatctaatcctacaacaaaaacaagtcaggtgtacagttcccgagcgttttttttaccgtgaaaatttagtttgcttcaaacgcaagacatgaacgggacatggtcgtataggtttaaactaaaccacaaatcaagtaaaaggtgtttctcctcccccttggtccaaagacgaataatattcacaccaatcccttctattcaagttcacaacatttcacaggaccagagagaataaactattgcctggcc

SEQ ID NO: 16513 - DNA, 69 bp, Gossypium hirsutum
  Clone ID: LIB3829-020-Q6-N6-D6
ttttttttcaaactaacaaacctacataattaaatgccattacccaatggtgaaatatacgttcataac

SEQ ID NO: 16514 - DNA, 534 bp, Gossypium hirsutum
  unsure (1)..(534): unsure at all n locations; Clone ID: LIB3829-020-Q6-N6-D7
aaatccgacaaaatgacttaaaacgttgcataaaattataaangaaaaaagaaagaagcaaattgcatctaaaaatctataaacattaaggattaataagcaattggtgagagtggatatctagaaagctaatccaattcatctcatcatcttcttctccatcagctatgtggctccattcaacttggggattaatcttttcagtttctgtatttcttatgaaccttcctcggatccgtggcctgctgtctgccaatgttttcctacatgcatacttaatcttcttgttgaagttcctgagttttcttttggttctgtatctttgaatcctctgtttcttttcttcgggactgtagcggcaggctctgctcattccttcaatgattgcactactctcatttgacaatggactctctgccttcctaccactctgctgcacctggtgcagatcaccggtactgaaaactctcctcaccggagcagaatcagagtcaatgaagtcgttaaggcttgaggcaaaacgacagtggaatt

SEQ ID NO: 16515 - DNA, 543 bp, Gossypium hirsutum
  Clone ID: LIB3829-020-Q6-N6-D8
ataggtaaatatgcaaattccattcaaagagaaaccatacatagatgcaaccggtaaacaaagactagaaattatttaaaaggccattacagggcacagtccttcacgtaaaaccagaaaacccacattaagggagaccttaaggcttagaacccaccacgaagacgaagaacaaggtgaagagtggactccttttgaatattgtaatcagccaaagtccttccgtcttccagttgtttcccagcaaaaatcaacctttgctgatctggtggaattccttctttgtcctgaatcttcgctttcacgttatcaatcgtatccgagctctccacttctaaagtaatcgtcttaccggtcaaagtcttgacgaagatctgcatcccacctcgaagacgcaggaccagatgaagagtcgattccttctggatattgtaatcggctaaagtccgcccgtcctcgagttgctttccggcgaagatgagacgttgctggtctggcgggatgccttccttgtcttggattttggctttcacgttgtcgatc

SEQ ID NO: 16516 - DNA, 497 bp, Gossypium hirsutum
  Clone ID: LIB3829-020-Q6-N6-D9
gaaaaacacaacatcacaacatatatttatttttgaatacctctttactaaggttcagcagaattacagagaatcacatttaatcaaagtcttcattcaacactccaaatacaacttataccaaaacttgattattcagatcccacaaactgaaatctatcctagttgatcaaattatgtttttttcccttgagaagctcttagggttcctgaaaatttctatagggcggcctcagtttactagagctcgttaaaacgtttctccatactaatttggggcaaaaacttgttcctgtaagttaaccctttaaggagatctgaaagcttcaccagcatagcagacatttccgagttcgtcttcaatgcgaaaaagctggttgtacttggccaacctctcacttttacaaggagctccagtcttgatctggccactagctaaaccaacagaaaggtcagcgatgaagttatcctctgtttcaccacttcggtggctgacc

SEQ ID NO: 16517 - DNA, 520 bp, Gossypium hirsutum
  Clone ID: LIB3829-020-Q6-N6-E1
gcctaaaatggtcttatacattaccaacatacaaatgggttgatcagtaaaaatacagattccgagcaacaagagatgactacagatcttttatctaatgaaccattaactcgcgtgcaaaaagctcaatcatgcaaagacaaaaggaagaacaaaagggcaggactaagaacatgattgcaagactagtatttctcggaagtactcatacgacttgccaagcttgtaaatccagcttcaaactgtgaaaatgtaatcaaagacactgcaatagataccttaaatcttgctaagaacgttctcagcagctgcaactgtcttctggatgtcttcaggagaatgtgccaagcttgtaaatccagcttcaaattgtgaaggagcaaagtaaacaccttcgcgcagcattccttggtaaaacctgacaaattttgctgcatcactcttctttgcatcatcaaagttgtgaacaggcccttctgtgaagaaaaacccaaacatccctctaatatgccctccgcaa

SEQ ID NO: 16518 - DNA, 525 bp, Gossypium hirsutum
  unsure (1)..(525): unsure at all n locations; Clone ID: LIB3829-020-Q6-N6-E11
gacaacaaatagcaaaaatatctttcaacaagatcctacagcagattacaagagtctatagcatatgtacaacatatctacaaatctaaggccaaatctgttactacctaaactaaaactaaatggaaacgtacactcgatgctgtggcaagttaagttttccaaggaaaattatgcagaaaattatagacaaccccccacctcatcggaatggttataacctatttccccatatcctaaccatatttaaaaagggtattaaaaaaatagagttcatattctaatgcatatagctggatgactaaagaatgtatgaaaagtgagctccaaaaggaccaattgagatagaacaacttacatggagtacgatntcaaaaaatcatacaagaaaaatataacaaagttagtcagcttttacttgctcttcccagtggcaccttctctctgattccggaagtgactgagaagctgctgtgcctttttcttttgctctttgcgtgccagactgggacaatgcgacaaggg

SEQ ID NO: 16519 - DNA, 568 bp, Gossypium hirsutum
  Clone ID: LIB3829-020-Q6-N6-E12
tcgcgatctattttttttttttttgaaatttcttggtaacgggattctctccctcaaccaagaattcttaaccgagaccatttttataacagaaacgtcctcacaaatggttttttttactaatacaacaaccgacaagaagaaaaacgacacaataacattctcaaaaaaacagtaggaatatctgaaatgaagcacacgactttcagcaaccaaaacaattgctaaatcaacaccgttattaggtagtaagctccattatagcactaacaatgtcaccatcagcagccttgagtgccttgacagcctttgacctggacactcctgcttgtgtcataactaattcaatgtccttgggctccacccctgtgtcatccacttcttcatcgtcctggactgctgttgatgactccggtttcgatatcacatggcttagatcaggagccttgaattgctctgcagcttgactctgcagttgtgagcttaagtcctcaatcttagcctctccaaatattacataagtatctgatgctgggctcttgaacacgtctggttttgagatgacaaa

SEQ ID NO: 16520 - DNA, 522 bp, Gossypium hirsutum
  Clone ID: LIB3829-020-Q6-N6-E3
attaataaaaaagggctccggacaaagggttcattaggcaggctaatcaccttacgtaacaacagaccctggccatgattgaaattatgtcacctgtatgccacatacaacaactgctttgtacaaaaggatgggttgttttacaaaggaacccatagtgcccccggctaaggggttcccatcctgaatctttttgctgcccttactttatagaaggaaggaagggccatggctattcttgcctttacccgggcctgtttatcggacccaagtaactaataaaaaaaactaagctcctctggataaacaagaacctaactattctgattaatgaatatgaaccaaaggttaccagatgaccttacagctagcacaatcaaatgtggacccaactctaaatcacccagataacaaatattccttaaacatatcaggccctattacctggtcgattccaactctctgggaaaagaaaccatgggcacctaataaccggaacttccctgaattctttccaactaa

SEQ ID NO: 16521 - DNA, 460 bp, Gossypium hirsutum
  Clone ID: LIB3829-020-Q6-N6-E4
aaaaaaaagggaaaagaatttcctacccccttaaaaccacaaagtcttttccatcattaaaacacaagcaattgggcggggggggaacaaagggcgcatatcaaaggggaaaaaattgagaaccctttgaaatgaaagggtaatcacggggggcaaaacaatgggcaaattattcaaggtgcttaaaatctaagctccattgattaaggcaagggcatcggccccggttgggagggcagggattgccccctttttgggcggcgggagggccccacatgcatttgcaaaattcaacacttcccttaattttgcttcacccccaaaaaagggggggttttcaacaatcttgcatagcaatgcaccaacaaaggagtcaccggcgccagttgtgtccacggtattgacatggaaagcatccactgccccacggaaattcttgggggagaatcggctacccttt

SEQ ID NO: 16522 - DNA, 552 bp, Gossypium hirsutum
  Clone ID: LIB3829-020-Q6-N6-E5
aaaacaaaaccataagcttgcatattcttattactgagagaccaaacaaagaaaaatcctgttcctaaatctcagacagcttctaccaagtgctagaagcctagaacaccaatgcaggttactatcagagcttacccaaagatttgtggaaaaaagtcttaccaagataacagaaacaatccatgtgactgcgcttcatgggatgaacattaacaagtcacggagattattctctgaatcaagttgtcggattaagagcaagctcaatttcttccaatgatcgccccttagtttctacaacattaccagccataaacaagacagcaagaagacagacagcggcgaataccaaataaactacactgattccaaacttgtccacaacactcaggaaatacaggccgatgacaaagtttgatatccaatgcatgcaaagcgataaagccactgcttttgctctaattctggaagcaaatatttccggaagaagaagagcaggcacaggaccagcaccaagtgaaaacgataagacataaagaacagtcccaacaa

SEQ ID NO: 16523 - DNA, 449 bp, Gossypium hirsutum
  Clone ID: LIB3829-020-Q6-N6-E6
gggcccctccccgggggaaaaaaaaaaaaaaaggggcccccctcaaaaaggggggcccgcccaccccccccatgggggggggggggaaaccaaaaccgggaaagaaatgttttttttttaatcaaagggaaaataaaataaaggaccctagggggggaacaacaaatccctcccccccaaaaaaaccaagcccgcgggttttaaaaaccccccccaaagcaaaaaagaaaaagggggggaacaaaacaaacaaaaaccgggccccccttaacgaccaaaaactgggaaaaatccccctgggggcgggccccaaaaaggccccccttacaaaaaggggggaaattggaaacgggagcacccttttcaccattaaaaaaaaccttaaaaaaaggggggggttcaactttaaagggagggcaaccaaaccctaaaattgggccattggccca

SEQ ID NO: 16524 - DNA, 581 bp, Gossypium hirsutum
  Clone ID: LIB3829-020-Q6-N6-E7
gaatataaatataaatatcaatatcaatatcaatatcttcaattattcttagatacaaattttgttttccttgtgttgcctcatgcatgacttcaatcaatagtattttgtgcacattaaagagattattatagccaatcagccaagcagactcaaaacaaaacagattatgttcttctattaactagatataattctagagcagtgctcaagtgaaagaaaaacaaggtacttaagcattccctgcatctacatcaattctcttccacctgaccacagtcttcaaccacaacaggttgcaaagtcctcccgctttctgagcctactttttccatttccttcacaacgctataaccatccactactttaccaaagacaacatgttttccatccagccatggggtcttctcagtgcatataaagaactgagaaccgttggtgtttggtccagcatttgccattgatagacaaccaggtccagtgtgtttgaggttgaagttttcatccgcaaatttcatgccatagatagattctccacccgtgccattcccccttgtgaaatctccaccttgacacatgac

SEQ ID NO: 16525 - DNA, 594 bp, Gossypium hirsutum
  Clone ID: LIB3829-020-Q6-N6-E8
tcgccttttaacagccaagtctctgagatctttgtcttttagcccctccgctccatctctaaattccagtctttttgtctgggaaacagataataacttgtctgacattggctcagcagatcgaccaattgatacgattttcaaatttcataaagccatcagcaaagacttggaatatctggatgttgaatctggaaagcttggcgattgtgatgagacattccttaggcagtttattggaagatttcatctattatggggtttatacagagctcatagtaatgccgaggatgatattgttttcccagcattggagtctaaagagacacttcataacgtcagtcactcatatacactagatcataagcaggaggaaaaattgtttgaagacattaacagtgttctttctgaactctcacaccttcatgaaagttttaccataggtcatatgccaactgatactggcactgaactttctggtgcctacaatggtgattgtctgagaaaaataatgagctggctactaagcttcaggggatgtgcaaatcaatcagagttacccctggatcatcatatttaccgagaggaacttga

SEQ ID NO: 16526 - DNA, 547 bp, Gossypium hirsutum
  Clone ID: LIB3829-020-Q6-N6-E9
aggtataacttgacaggacattgactttatatagaaggatctaaaaaactacgaattcaaagcaaaaactataaaagaattccaataaagaaaacaagacaacaatgtcagatgttccaccaatccaacaagttggagatttcataacgctctactccactgcctgattctctccatctttatacatcttcaaccgagggacatccagtctcgtatcataacaacgtttatctgtattcttattacttcatacgcatacctaagtccataaacaaaaaccaaaaaccaatttaacctgtctaaataatctcccaatcagattcacaaaattccatgtcttgtgattctcgtttgttcctttgtctggatagtgcatgctgttcatcatcccgctttgtgaaccttgacttagaagaaaaggcatcccggagctttttcttgtatgacctgtgttttcctacgttgttagagacggaaagaagctcactacggtctactataatgcagctttcttcaagctttgtgttatcaaatgatggaacttctg

SEQ ID NO: 16527 - DNA, 261 bp, Gossypium hirsutum
  Clone ID: LIB3829-020-Q6-N6-F1
gcaatgaaacaaacatctctttctgcgtattttcatagaaaagaaatttaaacttcaagcatctacctcatgctatttttttccaaatattggatatacatcaatgcaaccttatgaaatgaatttgcactataatgaattctaacaacgcattaaaattttaccacaagaaagacaaatgctaaaagaccaaacaaatctaatcatcggcatgcatgtccatacagtcattagagccgggggaattggcttccctatttt

SEQ ID NO: 16528 - DNA, 563 bp, Gossypium hirsutum
  Clone ID: LIB3829-020-Q6-N6-F10
attcgaagtcactagttttgattaggaagcagattaaaacaaactataccagacatgagatcttatccattaaaatatcagacatcacactctccaccataaccacatttcatcataacattggaacctacgcactaagataaacctatcatttaatcttgtcctaaaagaggattaaaaataaacataaaaaaatagtacaacacatttgcctaacaacaaacaatagtttctccattctaagtgtgtgattaacacacttggaaattaagcacgctcgcccctgatcctacgagccaactgaatgtccttgggcattatagtaacacgcttggcgtggatcgcacacaggttggtgtcttcaaagagacccacaaggtatgcttctgcagcttcctgaagagcaagaacggcatggctctggaaacgcaaatcagtcttgaaatcctgggcaatttcacgaacaagcctctggaaaggcaatttcctgataagaagctcagtactcttctggtactttcgaatttcacgaagagcaacagttccaggacggtatcgatgag

SEQ ID NO: 16529 - DNA, 338 bp, Gossypium hirsutum
  Clone ID: LIB3829-020-Q6-N6-F11
acataatagttcaaaccattgttgtttttttcatcatcaactatgacaaattgacaataatctatcttaatttcttcaaagtcagataccccaaacccttttctctccatgaattacatatatatataaattaaaaccctgcttaatttccttagagatcatcacaatattaatacatagaaacacaacaaataatttttttcaagagtagaaaatatctaccattaatttttctaagaactcttgtttttagtcacccattccttcattcaaaaagttagagcttgttcttcagtgaaaaccctttatctatgactcgattgctccttgttgaaacc

SEQ ID NO: 16530 - DNA, 78 bp, Gossypium hirsutum
  Clone ID: LIB3829-020-Q6-N6-F12
ttttttttttttttttttttttttttttttactctcgttttcagttttaatgtaataatattggttgggatttccttt

SEQ ID NO: 16531 - DNA, 549 bp, Gossypium hirsutum
  Clone ID: LIB3829-020-Q6-N6-F2
aacacaatctaacctccctacaaatttacagctagaaagttcagggtgttcggtgagatatgttcacttggtagttattttaaaaggtttatttgacaatacaaagaagctaaatgcgtcaaaatacaaacgcggatcggaactttgcgcttgtggtctcggtcgggtttggacacccaggtgatgctaggaatcataagatacaaagaagaagaccattcttaccatcccatgagtaatcttctaactctatctacaatctgatttctacctccaatacttgagaatttgaatttgcagttatcatccaaaaggaacctgtacacttcccattcccgttccgaacttgaatgtcttccgatttctgccgagaatatgcaaattccaagagactttaaagcttgtgtaacatcatagaaaacccttggtcttccctttccagataactcaaccggattagcaaccagaagttcagtatctggccctcggttcgaaatgaaacacgcaatggatgaagcatttccatcctcaaacgagaacataatccgt

SEQ ID NO: 16532 - DNA, 552 bp, Gossypium hirsutum
  Clone ID: LIB3829-020-Q6-N6-F3
cactcataagacatcaaatgggggcaacccaaaaagtggcagatgctgataataacatcaattagatcgtatggttatttagatctaatccttgtacttcatttcggacatcttgaagccaggcatatcgaatgaggatgagaacttctcaacatcaaccttcagctcttggatctccttgttgttgtccaaccctttgttgaagtccttcaaaagcttaccatattgcttttggatgttcaaagtgattgtcacggctcggtggaggaactcgcctatctgttcaaagtccttctcaaccaaaccccttgaagtcatggcaggtgtaccaattcgtacacctcccggagccaaggcactgctgtcaccaaaaacagcattcttgttaacagtgatgttgcagaggtcacaaagcttctcaaccttgttgccagtcaatccaagaggtcggagatcccaaagaacaaggtggttctcagttccaccagtaacaagctggtatcccttgcccatcaggtactttccaagggcaactgcattggccttcacttg

SEQ ID NO: 16533 - DNA, 560 bp, Gossypium hirsutum
  unsure (1)..(560): unsure at all n locations; Clone ID: LIB3829-020-Q6-N6-F4
ataaaaatatatatantttcaattaagtgggatgctgaagaagacaccaacaaaatatataatgacgaaaaacgacagataaaattgcaagtctagcaaatcacttatgtaaaatattttatgaagatgcaaaaagaaaggtgcagctgttgtttgaatcatagattgaagtgtactcgctgtgtaactgcagtagaaacttgtcacctattattacagtcgttcatcacacaacttgataattctctgtaatcaaatttgttcgctgggagaacttcgggggaggagctccaccgcctctcaggggaatgatgttcacaaccttcaggtcactgtatgtactcgttgctgaaaaacggacagaaatggggaagaacacagatgaatctgctggaggcacaacaaactccattgatccactgcggttagagttatcaatgagaagtatggaccattctaagacagaatttctggagtcatatctccattcaccatcaatctgcctaacatttggggcctcccgaagagctgggagaggtacataaatcacaacgtttcgc

SEQ ID NO: 16534 - DNA, 534 bp, Gossypium hirsutum
  Clone ID: LIB3829-020-Q6-N6-F5
ttttttttcatcagtcaagcatattcacaagcttaattaaataacacaaaatatctttcaaaaggtttgggtaaagagtgtaaagatcaataactgaattcaaatcattcaatcaagataaactttaatatcaattccattatcaatgagggattgaaccacagctctgattttgccttcgaatttgtccctctccctgggagtataagaagctgtatacacatcggcttctctcgctctctcagctaatatccgcccgattgccaagcaagccggaatgtccgatctggatctcagtactgctttaatgtctttcgagtttgtgcctgcgactgcaacttgcttacatgtcaccctatgtgtgacagaagcggaaacaaaccgcttcgagatgaagacatcaagtgtaaatggttccatgtaggcttcggtccgttgtttaaatgagacatgcttgttcggattcttcgacttttttcctttctgataagtgtatggcttgctattatcatcatcaagaaaatcctctacccc

SEQ ID NO: 16535 - DNA, 237 bp, Gossypium hirsutum
  Clone ID: LIB3829-020-Q6-N6-F6
attgcattgcagttcaattctcatagatgataagaacgagcgacaaagaattcttgtcaatggaggaatatacataatgaaatttgaaatgaatataaaatacagcgaggttatgatagcagaggttggaaaattttagaacctaatcttacaccacatgaatctacagattcagggcccctttgtaaattcaggccattcagtaagctcccgacaacccagcagcatctatttaat

SEQ ID NO: 16536 - DNA, 562 bp, Gossypium hirsutum
  Clone ID: LIB3829-020-Q6-N6-F7
caaaaaaaaaaaactttttttcaatataatcaattaaatacattcaaacaataatacaaagatagaacccttaacttaaggcaacatcccacacacattaaggctccattattcatgcaaaaacattggattttacattaatggaaatctcccacgttaaaaattgaaataaaaaaacaaataaaataaaaagtcatttaccaaatcagaaaacattggaaaatcgaaaaataacttctttcacttttctgacgtggcatcatggcattggttaaaagcatttagttcttaacacgtggcaccgtccatacccgccgagattgaatcagtgtggtccatgaacgaaaggacagcttagtggatatggtaagtttccttaatctcattcatggtcggcgcgtgttcagacacgcgccacaccttgacggacttatccaagctaccactgtagacaatccatttccggttagtctcagtcgacatctggtgatcttcttcaacggctaagcattttaatggaccggtatgacccgttaaaaccgacaagcaagcatgaataccg

SEQ ID NO: 16537 - DNA, 451 bp, Gossypium hirsutum
  Clone ID: LIB3829-020-Q6-N6-F8
aataaaaaattttttgttacatttttttgttaaactttttagtaaaaacaaaaagggggttcccaaaacccctaaaaaggaaaaccctcaagaggggggggcgagccgccttttaagggcctacaaaaggggcccaaaacaaccaaaaaccaaggcccgcccaaaaagggacccttacaagaaaaacctggaaaagcctcaggccaaaaatcaaaatttcccggaagccccaaaaagggacccaagcctggaaaaaattggttttaacaacattgcccccccctcccaaaccaaattatctaccaaggctggaaaaccccggggaaaggtgcatttttctgaacaagatggcgggccaaaaaaaatttggtgggggaaacaaacccggcccggaaccggggggcaggaaataaaggaaaaaagtccttttcaaagcccggcacaaatggtt

SEQ ID NO: 16538 - DNA, 510 bp, Gossypium hirsutum
  Clone ID: LIB3829-020-Q6-N6-F9
atattgaatatggtgatgatcaatatttaacttatttgtgataaatcatatgtttgatggcgacgtaatacagacacactgcccaaattggtgctatgatatttgagacgtacacaattaccatagccatcggaatctattgaggtagacataagtatgccttggataagatgaaaattgaaaaagatgggagcaccttgttgaataaaacgctacatgtgttgcaacgcataatacttgtacttcaagcggtcgattctaggctaggttgacacctgagaaaattcacattttgcactatgaattcatgctaactgaatccttgttgggacattaataacatttgcttataatgccatagtgagatgaaaccactgaagattaaccgcagtgacagaaatatcttttagaggaaaataatcgaccacctttaataaatactccagaggttacctgtgaccatatgacaggactctgttggcaataccttttgaagtatccagagtagat

SEQ ID NO: 16539 - DNA, 542 bp, Gossypium hirsutum
  Clone ID: LIB3829-020-Q6-N6-G1
acaactaaaaatataaaatataaaattaaaataaagattgaatattcgctacaaaaatcgatccaacaatcaaaatacactaacgtttagccgaaatgtataccaccaacattcaacccaatgtacaaaagtaaataaataaaaaagtacctaagatgtggatattgatattgatgttgtactacataaaagctaatacagtttgaaactgcaactttaattccaagaaactctgctgatctcttatttctacaaaggtagccccaagtagtgaaacatctccagatccaagtataccatataccctaagaatccattttgtttactacctacttgtaacatatgcagttttctctcttatgacctttattgcttctcgactcttcgctatatttagcgatatccctcgagccccaaccttgctgtaagccaattgcagacctcattcatctctttagggattgtgtaatgaccaatccttgcaacatttctgatttcgtttgttgctccttgaattttcttcttcatcgatttaaaaccac

SEQ ID NO: 16540 - DNA, 520 bp, Gossypium hirsutum
  Clone ID: LIB3829-020-Q6-N6-G11
aatctgaatttcagttcattcatttcaaacaaaacatattctaaacaacattaccaacattttcctacaaccaaagtacacaaaaggaacctacatacattaacagataaatcaaaacaaaccctataatagacaaacaactaagccttcttaggtgatttctttggagactttgtagccttagatggcgacttaggctcttttgcagccgctttctcgtttttctttggtaaaagaactgggttaatattgggtaaaacaccaccatgagcaatagtcacaccagctaaaagcttcccaagctcttcatcgtttctcactgctaatagaacatgccttggaatgatcctattcttcttgttgtctcttgcagcattaccagctaactcaagaacctcagcagcaaggtattcaagaacagcagcaaggtaaaccggagcaccggttcccacacgttgagagtatcggcctttcttcaagtatcggccaattcgaccaacgggaaactgtaatccggctt

SEQ ID NO: 16541 - DNA, 547 bp, Gossypium hirsutum
  Clone ID: LIB3829-020-Q6-N6-G12
gaactaacaaccatgtattcacaaagataagttactgattacatataaaacctaaagtggcctcctacacatttgttctaagcagcggccttcttggcctttttagccgcaggtgacttgatagatttaggctgcttcgcctttgctggagttgatttcttcttggccccgactctctttgttggcttctttgtagcctcagctttcttcggcttcgaagctggcttagctttcttctctgtcttagcttttgtaacaggggctttctcttttttgccggcttcggagagcttgtaagaggccttgatctttatcagcttgcctctggcagctgagtttttaagctgaagacctaagattttcctgaaattcgctggaagcaccgccttgtgcttctcttccatgtatttggctatagcgtacggacttgaaccactcttctctttcaaagccaaaagcgcctccttgatcatctgaaaataaggaggacgtgctgtggatttgggttgtttaggctttttctcctttggagctttgggtctcttct

SEQ ID NO: 16542 - DNA, 513 bp, Gossypium hirsutum
  Clone ID: LIB3829-020-Q6-N6-G2
caataattcaagctatcagattattatagcaagcaagtcctcaaagaggaagcaataattgtaagttgctgcctatgcttggatcacaacacatcatgctagtttcaatgttaaaccggaaaatatggcattgctcaatttcaatgttgaataattcttgttttgagactcattgccatcagagaaaatcacactacattgcagctgtaattgatcatcagtttcactgagtgaagtttgtcccttgcctacttccacctcgccttcacctaagcttctgcttggaagaacttttcttagccgcttccttaaccttctcaatatacccttcaataggtggagtcaaagacgccatcaatcgatttgccggaaatggggtcaaatctggtatcatagccgcctccttaagtttctccggcaacgcttcaattgcctcctttttcattctcaacaaattagtctcagcagcctgccttgccctatgcttcctcatcaaaacccgactatactcct

SEQ ID NO: 16543 - DNA, 553 bp, Gossypium hirsutum
  Clone ID: LIB3829-020-Q6-N6-G3
aaaaataatacaaaacattgagcattaataccacaataccaccatttcagcaaaaacaagaagttattctttacccatacatctaattctcaaatctaaagcaaatcaagtagcaattcagattgcaaaataaaactaataataagggtaaagcaacgaacaaaaaggttaaaacatggcggaaaatcgagttacgcttcaacatttcttgaagaagaagaagaaaaaccgggtcgtccttgtctaaattttgttgaatgcaacgatgtcacaactctgaatatattcattgcgaggctcgactgtcaagtgttcttcgataagggtatcaacagaaacaagatcgtcaactattgtaagcatgatctggagcttcttaatcccatatccgaccgcaaccaattttgatgctccccataaaagtccaggcatttcaacagatcgaacggcttcttccaacttcttcatgtcggtctcgtcatcccatggtttaacatccatcagtactgaagattttccactctctttcttcttagcagactttttagctgct

SEQ ID NO: 16544 - DNA, 548 bp, Gossypium hirsutum
  Clone ID: LIB3829-020-Q6-N6-G4
ttttttttttttttttttttttttttttttttttttttttttttttttttttttttttttttttttttttttttttttttttttttttttttttttttttggggacccaaaacccccaattaaaaaacaaaaaggcccccggagaaggggggtttttaaccggaaccggaggggaccaaaaaggggccaaagaaaaaaggggacaggggaaaaaaaccagggaaggccaaaaaaacacccccccagaaaggggggggcggggaaaaaaagggaaaaaaaaaaaaaggggggaaaagggttaaccaaacccccaaaaaccaaaaaaaaaggggaaacccggggggggtccccccccccccaggaaaaaacccccccccggaacggggcccaaattggggtaaaaaacccccccaaaatgggaaaaaaaaaaaaaaaaaatcccctttggggggccaggggggaagaagggttacaacacccggggaaaaaacccggaacccccacccccccccacagggaacaaaaaaaaaaaaacaccggggggcccg

SEQ ID NO: 16545 - DNA, 526 bp, Gossypium hirsutum
  Clone ID: LIB3829-020-Q6-N6-G5
agacagaatctgtatttaatcaatgaacattagacattttactttagaattttgaactattgagggaactcatcagctcaacaaacatcatttccagttttttttctggctcaactctccttacgtccaagacataactcagttatctacatccaaacagacccttaaagttttcttttacaatccaagagcaccaaggggtgtctttccttggccagcctcaaagtagaaaatcaacatggctaacatcgcaattctagcatgcttaatctcagcaagcttaagtctctcaagcttgtcaatatcagggacgtagaccccattctggatggttcctgctagccccaatgggtcaaagaacttgcctcctgggtacccttgctcacctgtagcgttggcgaagttctcagcggtcttagaccatggagttgcccattccactgattgtgattgggggttgaagaaataacccaccgcttgctttcaacccaacccataaggatgagctgagtaccaaggagtgagc

SEQ ID NO: 16546 - DNA, 554 bp, Gossypium hirsutum
  Clone ID: LIB3829-020-Q6-N6-G6
aaaagttgaagaaaaagttaactattcagtgagtacacgtaaacatcatacaataagaacaaaagagcagggaaaccagttttttgttggatctatcccatgaaaactcactaaaaatgctgctaaaagtatattccaattggcacatgataacatagaacatgcctagttttttcaccagcatatcagcttggaggaggaagaaaaaaggaataaataaaggaatacgataatagaagtgtttcacctttaacataaaaaatgtccaatcaagggaactggaatgatcctccaatttggttagtggtggatgggggattgattgcaacccaaaggagggatatggtgatggccataagacctgaccatacgaacacaatggtaggtgtcctccctcttcttcccatcagccctttagcaaaaggatagagatgagccagaacccagaagctgaagaaaactccacctagtagacgactccactgagggataacactgtaaattgttcggctgaacccgactgctattgctattaagttgaccatcatgatcgc

SEQ ID NO: 16547 - DNA, 92 bp, Gossypium hirsutum
  Clone ID: LIB3829-020-Q6-N6-G7
ttgggggggggggtgtgtgggaatttttcttatttgcccctctctttacctccttccgccccccccgccggtgccctccccgcgcccccccc

SEQ ID NO: 16548 - DNA, 549 bp, Gossypium hirsutum
  Clone ID: LIB3829-020-Q6-N6-G8
ctgcaaggctttgctcagagatgaatacactataaactttatagtacaaagaagtgatttaagctttacccctcaaacacttgatgcaacctcacctttatataattaacttttcttccaactcattttagctatgcaagtgaaaatcaacatccagatagtgtataacaatggcactcaataatagttcctattatgaacatgtgtgcttctttaaattcacacatcatccatgaaataaatcatctatatataagctccaggattggtcaaactcttcataagctccgtgtaaagtggaacaataaatttccaaatgcaatatctccgataattatcatgcttcaacaacgagactgttccaaaagcaacaatgaactgttgctaaacagaacttcatttatgtgcatgaatggccattttccatgcttttccagttcaagttcaacaaagggccaaacatagggcatcctcatttgtaatagtaacaaattcccattcccaaacatagagcatcaacctcatcgtcaccaccaaatattctgaagc

SEQ ID NO: 16549 - DNA, 466 bp, Gossypium hirsutum
  Clone ID: LIB3829-020-Q6-N6-G9
ctcaattgctaaacttgcaccgaatctattaactcccaacaccaattattttagcttttgcaaatcaatttgaagccccataatttgtcagtatgtagtcaaggagacgctcaagatacagtacaagttttgatatggaacccgctgatgcacagcacagtccatctaacaattcccataccccgcaaagctgctaagacaaactcggagaataagaaactgcaggtctgagatggcccctcgagggtgatacagccataagagaagcccgctgcggcaccccagaaccttgtgaagagcaatcccatctaacaggaacagtattgcctcgacccgaagggattgcattgaagttcttattttgaaccatgtttgggacacctactaaagctccttcagaatgataacaagtaaaatggattcctgcgccttatgctgtgattaggaactaatggtatagaaatgc

SEQ ID NO: 16550 - DNA, 570 bp, Gossypium hirsutum
  Clone ID: LIB3829-020-Q6-N6-H1
gcaacaaaatcacccctttgatacctcaagggaggaaaaagaacaaaccatggcttgtctacaatatatatgagataggatcaattctgcccggagaggcgaacggattgcactcttcactgagtcagtttaagaggaaaaaaggagaaaaaaaataacacaggaaaccatgtcagcctatagccttattccatgaagaaagaacagaggaaagaacatgtgataaaaaaaaatactatccttattgttccgttgcgattgaccagaatgatggtcgacaacatgagcaaaattgtggaaaatcctctggaatacatttacgagccgtcttgaactacgaccacaggtgatctcttctatactctctcacaatgacaggcacacttgtgggtggaatcatgccataatctgtgattatcatggagacataatctgaaggtgttgcatcatagattaaattcagaagctgcagattttcttgattgaccaaaccgtctaagtagttaatctcctctctgccttgaacctttgaaatggcatctgggttaccaagctcgttaaaacatatgg

SEQ ID NO: 16551 - DNA, 540 bp, Gossypium hirsutum
  unsure (1)..(540): unsure at all n locations; Clone ID: LIB3829-020-Q6-N6-H10
aagatgaatttacaaagggtaatgggtgacaaataattacaattaaaagaaaaataatttaaatgatttgatttctgattatgcccaattagattattctgctggattttaaatttacggtaaaattatagttttgctctctataccatacacgattttgagaatcaatttttgtaatttaatttaacataatttgatattcttgctattattcatgttatgccttaatccatatcattaatatacggagtttttatttaggaaaaaaaaatctaaaatcatgaggctgagcaattctttttaaaatgataaattagtaaaaaataataataataactataatttcaccatttaaatgacataaggaattttgagtttcgggttttcaaaaataatttggcttaaggcataacatttataatagtaggaagattaaattatgccaaattaaaatacaagtagtaaaccccaaagttgaatatagtncagggactaaaaccacatttaaccaaaattaccttttgcctttctaagatgatt

SEQ ID NO: 16552 - DNA, 547 bp, Gossypium hirsutum
  Clone ID: LIB3829-020-Q6-N6-H11
aaattgaaaatgataactagtataacaataataaacctttgctacaagcagttggttttgtttagggaatgactgaaaaattggtatgaagagggaggagcctggtacaaaaatagactgtttccaccataaagaggttgaaaggagactgtaataacaaaataatttcgacaaaagaatgtttcttcttcctcttctcccggtatatgaaaacgggatcctaaccaatagttttattctcatgtgaatgatattctattttcactatgaatttaaatatcccccttctattcttcggaaaccttgaaaaaagtatatgataaaatcaggttgtttataccatccattcgggcatctgtttcaaactcaggatctatgtagaagaaaacaggcatgtcaatctgctctccaggaagaaggcgctgctcctcaaagcaaaagcactggattttgttgaaataaacagcagccttcataggagtgacgttatacgtagagacaccagttatgggttttgaacttcggttttcagcagtataaaaagcaa

SEQ ID NO: 16553 - DNA, 565 bp, Gossypium hirsutum
  Clone ID: LIB3829-020-Q6-N6-H12
tttttcctcatattttgactacagaataagattttacaaattttactaggaaaaaaaaacaaggaagattaaggatttgctttggaaacggggtttgaatttgatggcatggattggatttaattaattaattaaaatgttgatatttaggttagagatggccccttcataatcccaatactatgtagtagacaagcgttatgggcaaggctattagcattccaaaaataacagcagtgctgagaatatcagggtgtaggttgtattccttggcaaagacaaaggggacaatgccttgtgggagagctgcctgcacaatggcaacgtgtaagagaacgccacggagtccgacagctatggaagcggctgccatcacagctggacctgcaaggaatctcacacccatggcaaaagctgcaacggaatttccacatgctatgatcctcggttgcaatgccatgaacagaccaagactgaacatggccatgccaagccctgcatctgacagtatggaaatggacttggctattatggcaggcatttgtacattccacctgaatgagat

SEQ ID NO: 16554 - DNA, 291 bp, Gossypium hirsutum
  unsure (1)..(291): unsure at all n locations; Clone ID: LIB3829-020-Q6-N6-H3
ccccctcnccccccccccccccccccttcccccccccccctccnccccccccnctctccccccccccccnccccctcccttccccncctctccccccccnccctcccnccccccccccttcccccccccccccccccccccccccctccccccccccctccctctctctcccccccccccccccccccccccccccccccccctctctttcccncccccccnccccccccccctcccctccttcccccccccccccctcctttccctttccccctccccccccccncccct

SEQ ID NO: 16555 - DNA, 576 bp, Gossypium hirsutum
  Clone ID: LIB3829-020-Q6-N6-H4
gataaaatcgaatttatttatttaacttgtgatgctttttttcatgagaaattgatacaattagagtttgtttttatatacacagaagggggggggcacagccaccagtagtatttggatttccacaaagaaaaaagagaggtaatgtacagttgaaggatcaaatgtagggattgatatgggaagaatagtcacgaataccagctccttcccatcccatccattcttcccacaaatcccaatctgaatcatccattcctctcattggctcatctatctcttcctcatacacttctgctgcctttgtttctcctctcaatctactcatcaatatatcataagcttcattgatcgtttgaaactgaaccccacaattgcttcctctgcaaacgtccggatgatactgaagggcaagttgcctgaaggcctttttgacttcagattcagaggcgccgggttggatcctgagagttttataaggatccatcaccgacggagcagaagaacaataaactctaactctgttggccatcttcttctttcccttttccttaacttgcatccacgaggaacaaa

SEQ ID NO: 16556 - DNA, 289 bp, Gossypium hirsutum
  Clone ID: LIB3829-020-Q6-N6-H5
gaaaaaaaaaaaaaaaaaaaaaaaaaaaaaaaaaaggggggaaaaaaaaaaaaaaagaaaaaaaaaaaaaaaaaaaaaaaaaaaaaaaaagggggggggggggggaaaaaaatttttttaatttaaaaaaaaaaaaaaggggaaaaaaaaaaaaaaaaaaaaaaaaaaaaaagggggttttaaaaaagggggggaaaaaagggaaaaaaaaaaaaaaaaaagggggggggaaaaaaatttttttgttaaaaaaagggggggggggggggaaaaaaaaaagggggggggg

SEQ ID NO: 16557 - DNA, 548 bp, Gossypium hirsutum
  Clone ID: LIB3829-020-Q6-N6-H6
cattaggaaaatttataaatatatctaaagaaaaacaaatttacattcagccccctcaaccactctaaaatattacaaaactctacgtttatttgtttatcaagttgacttgaatactaccagccccacacctggagccatgttctcctgcgccgcgccttcactgtgccggtgctccccttcgtatgttacaatcaacatcgacggatcatcggtcgctcgctccacgtgtttcctagcgggacaccctctgaccgtactacacttgtaatatccccgtgggtatggtgagcccttgatcggtttttgaccgtacttcctccatgaatactcgtctgccggaatgtcggcgatcttagaactgatggctggaactctgattacttttttcaccctgtttttccttcgctttgagcagtgacacttgccgttgccggagacgttctcggagtgctcatgttcgcggcacctcttcttgaatggagcagaggatagtggtggttttcccgcggaaacggccgccgccggtgtcaaaaatagagatgatc

SEQ ID NO: 16558 - DNA, 566 bp, Gossypium hirsutum
  Clone ID: LIB3829-020-Q6-N6-H7
gcaaagatcaaagattagagcaatagcaatttgtaaggtaaattcagggaaagtccgaaatgaggatcaatgcctcaaccaccacaaaaaaaacacattgttaaatttggcttattacatcgggaaattttcaacagacattaggttccaaggaaagatctcaactacaaaaattaaagtttcccagaaggttgtttctgtttcacctttaattcctgcttttcaacttctaattctttttcaccgtcgcagccttgatgatatcaacaaactcgggctttagagaagctccaccaaccaaaaagccatcaacatcgggttgtgcggccaattccttgcagtttgctccatttacggaacctccatatataattctagttgatgcagcaatgtcaccgccaacattctcatgaagccatttcctcaactcgcaatgaacttcctgagcctgagcaggggttgcaactttccctgttccaatggcccaaacaggttcataagccaaaacaacattgtcccaatttgttacttttccagcaattgcttttggtttgcgcagcaacaac

SEQ ID NO: 16559 - DNA, 532 bp, Gossypium hirsutum
  Clone ID: LIB3829-020-Q6-N6-H8
gacctgcacatccttatcttcactaacatttaatggtcaataacaggtacaagaaaactggatcatttatgcttctcatcaacacctggcaaaacagaagatactactattgacaagtttttggtttttctgatgacctcgaacgatttacactcagttaactctggccaatgatgtatcttcttgatgtcctccattcaaacctattggagtttcccaaaaacaccccaagattggacattgaatgtcttggttggttggttttacaaaaaaagagatgttttgttcctttttttttttcaatagttactgggccagttcatctgtgcatgttgaggctgccgataaacaccagcggcagatccccccatgttaacagctccggccatagtttgagcttgttgtaaaagaggatgaacggctgccgctgttgctgcttgtggatgatatataccagcaaaggagccaggaacaacctgcgttggagcaaaagttacattctgaccttgaggggcaaggttatagaatgaac

SEQ ID NO: 16560 - DNA, 551 bp, Gossypium hirsutum
  unsure (1)..(551): unsure at all n locations; Clone ID: LIB3829-020-Q6-N6-H9
cacctaaaaaaaagcaatttattattaccatnaaatataaggtggtacataaattctacaggcgttaaacaccatatgtgagagctttactctctttcaaataaccatacaaatcacaaatttcagtaataaaaaggaaaataaaataaataaaaatgcaaagcaaatggtagtgcagcctgggctagccaacatgaacattagaaccttgtttaagcagagatactatgaagcaccacggtctcaacagtgagccctggtccgaaaccaaacaggacaccccactcgagcccttcacccgtggttccaagtccatcttcctttgatttcttcctcatctcatccaatatgaacagcacacaagcacttgacatgttcccatattctgaaagcacgtgcctcgtggctcggagtttttcgggtttaagggctagcttcgcctcaacctgatccaatatggctggaccaccggggtgagcgatccaaaagagcgagttccaatccgaaatgcccaaaggttgaaatgcctcagctaggctcttttcaatgtt

SEQ ID NO: 16561 - DNA, 542 bp, Gossypium hirsutum
  Clone ID: LIB3829-021-Q6-N6-A1
ctctatggttggcacttcattaggaatgagctccgcgattgctttccagtaattcttatcagcttcggcatggaatttctcatgattggctacaaatatcttctctttgtctctgttattggccttgttgttttcacaggtcacctcccttttcttataaaactcaactttgtattgatcagcttcctcaattatttggctcaataactccttctccctcttgtccttctcctccaaccgaatcgcattctcccttctccattccctgagagcaacaccttcctcaggctctatctccgccggcggaggcaaaaccgggccgtccgatccgccaaaatcttggccaaaacctaccccatttgtgtatgaatctgatgcaaacacatcatcagtggagcccttggcatgatccgagtggtcggcgaaagagtcgaattgctgagaagggtcgtatccggcgtagccggcaccgtcttcatcctggtgtggaacagagtcaaaagagtctaaggagtcgtcggcgagtttgagtgaaagagtca

SEQ ID NO: 16562 - DNA, 543 bp, Gossypium hirsutum
  Clone ID: LIB3829-021-Q6-N6-A10
cctactccccttgaaagcacaaagcctaacaacactacacagggagggatggaggaaaaacgagggaaaaaggaaattcaaaagaggggaagaaaaaatcgatacctttcaaaaccctctctctgaaatgtaagaaattaaaaaaagaaaaagatgagcatagattattgaagtttgctgctaataatcctaagctccattgattaaggcaaggacttcagcctcggttggaagggctgggattgctcccttcttggttgtggttatggctccacatgcatttgcgaatttcagtacctccctcaatttcgattcattctcaagtatggttgggtcttccacgatcttgcatagtaaagcaccaacaaaagagtccccggcgccagttgtatccactgtattcacatggaatgcatccactgacccatggaagtacttggtataatacatgctacccttttcaccgagggtgatcaagagtagtgtcaagttggggcgccaaatttcatagcagtttcatcgtcgattttgttgctaccggtg

SEQ ID NO: 16563 - DNA, 476 bp, Gossypium hirsutum
  Clone ID: LIB3829-021-Q6-N6-A11
caaggcaaattccaattactactgatttcatttcagcacagagttaaacattgaaactaaaacaaaggggttcacaggggtttcataataacaatggatgccaatgtttggggggaaacatttggttttaacagatagggctttgttgtcccggggaagcttcctaacatgtcccctgaaagggcatttaatcgactgcaactggctgcatgttttcagcttcattccttagttctgggaacaggaccgatgacaagtaacgctctccaaaacttggatgaacagtcacaattaatttgcctttgttctcaggctttcttgcaagtctgagtgctgcaacagtgttggcccccgatgatattccaaccataagcccctttttcaatgccaattcccttgccatgtttactgcattttcactgctaacctcgaaaactttttccattacatccatgtccaatatgtgtggcttgaac

SEQ ID NO: 16564 - DNA, 383 bp, Gossypium hirsutum
  Clone ID: LIB3829-021-Q6-N6-A12
gaaagggggacttcaatttatttctctacttttcttttcgttttttttttgtttggtttctttttttcttttctttttacaaactttttgatgaaaagggggcctttttcaaagaaaaaaaggggtttaccgaacccaagtagcctcgtcgtcggagactgctcctccgtcgtcgaattcggcttgaaaaggtcccggggagggagttccttctttcggatcttcctcggtctaaaaaaccctcaccgtcgggctcgttttgaacaaaaggggttaaataacccaagtttacgtggccctcgactaccgtatacggggggaaccaccgtggcctcaaagagccaccaccaccatggcgatgatgggtgttgaaacccgacccc

SEQ ID NO: 16565 - DNA, 380 bp, Gossypium hirsutum
  Clone ID: LIB3829-021-Q6-N6-A2
gggcggtaacaacccagcccttctggacaaaaagcggggcaaacaagcctaattctaagggtggggccaccaaataatgcaaacctgaaacaaagaaccctccaacaaaagcttggaacaaaaaaacaaagggggcctattcattaatagatatcttagcaaacttatctgcccgggtccttttttcctttttttttaaaccccaattttaaaacctgggtttagggggggggggcctttacttggccatcatgactttgacgaactcctcggagttgatctggccataaccataaaaattaggtttgggggttattttggggacttccttatttgtaagcttttcaccaaggtttggcatgacatggggcaacttgggt

SEQ ID NO: 16566 - DNA, 532 bp, Gossypium hirsutum
  Clone ID: LIB3829-021-Q6-N6-A3
aaacaaaacatgtagcacaaacaatgatcaaacgaacaattgattaattaaaacactacttgtctgagatatttaggccaactcaaaacaaaatgtcacatccactggtgcaaaggatgcgtataaaccaaggaaataaacactctgcctgacaacatatatgaaacattcaacgcttcttagagacacctacagtctttcctctgcgaccagtggtcttggtgtgctgaccacgtacacgaagaccccaataatgcctcagcccacggtggttcctgatcttcttcaatcgctccaagtcatctctcaacttcatgtcgagagcattagacacaacttgggaatacttcccatccttgtaatccttctgcctattcaaaaaccagtcaggtatcttaaactgcctggggtttgcaacaatggtcatgagattgtccagctcctgtgcagtcaattcaccagccctcttgttcatgtcgacatcagccttcttgcaaacaatgttagcgaaacgccttccaatacccttgat

SEQ ID NO: 16567 - DNA, 539 bp, Gossypium hirsutum
  Clone ID: LIB3829-021-Q6-N6-A4
agtataagaaaacatttcattcaaatatttaatttactaacaatcaaggcattagcatagtcacagagtttaaacaagggcagaggttggaccaatccatataaaatgaaattttgaaacattctgctgataaatagtaacatccaagctttgcaatcaaccatctttacacacattcttcgcttcggaattttcagacgaaacggcaggtgggataacttggatcgacggtggtgatttgaccagtgccggcgaaatcgcagctgaaatagctctcacctttgattcgatagtaagtattcatcgcgaaggcagcatgagcccggacagtgttgggttcatagcatgctcctccgggctgaatcggtgtgcaatcaatgccgtcttgaccgcatgcataatccaggttcgattgcagctgggtgttgctaacatcgactttcggaacacagaaattcttgctggatgatggtgctggagttgctggtgttggtgccgactgccctcttcgtagaagcccgacatcataaataggggtc

SEQ ID NO: 16568 - DNA, 547 bp, Gossypium hirsutum
  Clone ID: LIB3829-021-Q6-N6-A5
gataaatgttagaatttcggttcttcttattgatattcttaattttgtattcatggaagtttgcctacatatatgtcatttcgttctttgcagtcaaaacaaatacatggcatggaagggaactcactgattatctccacaacaacatagtgatgataaacaaaaggggagctctgaatcacgatgaagttttgcttccatctgatgtcagaagcaccttgtataaatcgggacgtcgatcacgaaacacaccccagcaacttcttttggatttgattttgtcaagatcaaactgtgctatgagaactgcttcatctttgtcattagcagctgcaacgatttccccagttggtcctgctatgaaggaattgccgtagaacgtaatctgactcttcccatgctctgtctcaattatttcctttccaatgcggttagaagctaccagaggtaccacatttgcaccagcatgcccttgcatcactcgctgccaatgctcacgagaatcaagtccttcatcctgtggttcagagccaatagccgctaggta

SEQ ID NO: 16569 - DNA, 539 bp, Gossypium hirsutum
  Clone ID: LIB3829-021-Q6-N6-A6
gtagcaatccatttttatattatatcagaagtttaagagttcatgtgggtacattattattatggtgaagcacaacaatatatataggtatcttggctgataagggataataataatagacatgactagatgaattactctcaaaatgaagcagctttaagaatgtccatgtcagctacctctctcacaagatttttggttgaaggtaaaccagctaccacatcatcttcgattccacactcatttgtgccccttctgatcttgaagtaaccatcttcaccccagcctttattccactggtttgcaaggagccagtaatcctccccatcatcagaagttccccacccgataagcttaactgcatgacctcccataacactgcctgtcacatgcttgtaaactccagatttgtagtgagcaaaatcctcataaacggtgaaggcgacctcaacaggtccattcttataaacttcagccatgatatcagttggatctgagttgattctatatgccccgacactatagtgcttggactgact

SEQ ID NO: 16570 - DNA, 532 bp, Gossypium hirsutum
  Clone ID: LIB3829-021-Q6-N6-A7
tttttttttttttttttttttttttttttttttttttttttttttttttttttttttttttttttttttttttttttgggggaataaacaccctgggtattaaaaatatttgggactggatcaaatgaaaagggggaaatacaaatagagatactttggcactattcctttttagaatccaacccaggggttgtattaacaacaacagggttggggggattataggaggatggggttgtaaaaactcccttattggcagttgagggcaaaactttaactgcagccccattgtttgcagggccaccactgcccatcgatgtacttagggaaagaaattttggaataaacccctgggcctccaaagcctcgggggccggttggtttttgggtttttttggtctttccaaaaatttttcctggaaaacctgcacttgcttttgttggtaaacctggaacctttcaaaaacacttaaaaactccccaattgggggactttatttttttattaaaaggtttgggtacagccttccct

SEQ ID NO: 16571 - DNA, 544 bp, Gossypium hirsutum
  Clone ID: LIB3829-021-Q6-N6-A8
acataaactgcgcatgctttgctaagtattgagcatgaaaagctcaagaaaaaattcacttagaaacataaatgcaacaacagtcacagcataatgactatttctttcagcaactggaagttgagattagaatttgcccaactggcataaagtttttccttcctaatcctcgtactccgcttcctcttcctcatactcatcttcatcagctgttgcatcttggtattgctgatactccgagaccagatcattcatgttgctctctgcctcagtaaactccatctcatccatgccttctcctgtgtaccaatgcaagaaagccttcctcctaaacatagctgtaaactgctcacttacacgcctaaacatctcctgaatggatgttgaattgccgataaatgtggatgccatcttgaggcctgtgggtggaatgtcacaaactgttgacttcacattgttaggaatccactcaacaaagtaggaagagttcttgttctgaacattcaacatttgctcatccactttcttagtgctcattttgcca

SEQ ID NO: 16572 - DNA, 534 bp, Gossypium hirsutum
  Clone ID: LIB3829-021-Q6-N6-A9
gaacaaaggatgcttttgcatactccatttcatgaaaatggtttacttttcatacattgtctctattaggagaaaggggggggggaatgctggatgtctctcacacacacgtaagggtataaatttttcatcttttttcaagaatttgcttcacaggtttaggataagtacacttggacaccagcagttttcgttacctggcatacagggcaaacattgattgataaatcacagtctttacataagcagaggtgcctacatggcatcaacaaaatggacacctcctttgcgttgcatgctctgcaaataatgtgttccttcatgcccttggaaacacattttgcagccccaagaggaatactgagaaagttgttcggatcaatataggaggctgcatcatcaacttcactatctccaaaaccttctttcccgtgttgagcaccttgtgagattacttgctgaaggtggctcttcaacacattaacaaccgactcgttgtattttgctctataatgccaattatgtgcttctgca

SEQ ID NO: 16573 - DNA, 531 bp, Gossypium hirsutum
  Clone ID: LIB3829-021-Q6-N6-B1
gaacagcaaattgtacaatggcttaaggggactggattttcacctaagaacaaagtaaacatcaatcaaaggctgaaaataaaacatcaatcacatcttagcaaatgaaatccaacaaattcctagctagtcattatgaagaggttacaagcataaaaccacttcgttcgtcacgatctagaggatcgttcaaggcaacttgattccctgaaaatgacttgcaagcctttcaaaccgtaggatcttcaagagtggcattcgacaaatcgtttattcgaggataagcagctttctcatcgagttgattttgagcccatatcagcatctttagcaagcttggaagcttggggtctttttcatgactctggctagtaagaatggcagcgttcacctcacttgctgtcttaagtcgctgtgatatgtccagaagttctccgactgggcagtttgaaacatcttcaaaagccaagagcgatacagttctctccaactcctctaaaaagctttgattttcttctcccctaggtgcga

SEQ ID NO: 16574 - DNA, 541 bp, Gossypium hirsutum
  Clone ID: LIB3829-021-Q6-N6-B10
gaattgataatcaaaactccaaatcatatagcccaagtattataacatattcaaacacaacaaaaatcattcgattaaacaaaatccgacgattactgaaaatttaaaacctaaaacccatattgggaaaaaccctaaaagatccatcttttgcacgagccctacttaatctccaccagccttctggtaaacataagtgagtccacacttaccgcaatagtgcctatcgaaatggttagccatgaaagttccagcaccacactcagcattagggcactctttcctcagcctctgaaccttacccgattcatccaccttgtagaactgtagcacagcgagcttgaccttcttcttcttgtgcttgatcttcttgggcttggtgtaggtcttcttctttctcttcttagcacctcccctaagacggagcacgagatggagggtggattccttctggatgttgtagtcggctaaggtgcggccgtcctcgagctgcttgccggcaaagatgaggcgctgttggtcgggtgggatgccttccttg

SEQ ID NO: 16575 - DNA, 552 bp, Gossypium hirsutum
  Clone ID: LIB3829-021-Q6-N6-B11
agccagaatctgaaatcaccatattagagaataatcccatagttaaagcctttgggagttttagagaaccatgtgtattatcatacaagcttagagattgcttccgaccgaattactactaaaagggtagcacctggaagctttttttttggttgcaaatatcaaactctttcaaactgtcattcgtccagatttcaatatggaattgacattgaatagcttacattgcataaaaatgttattttatgagagcaaacggttccaccggtcttcatgcaccgcttgcatataaacgcgtccattcctttgctgtctcaacagcttcagccttgtttgatttccagtgcttagcaatattctccgagagtggatcatctggatttggagcactcaagagtgcctggatgcttaaaagtacagttcggatctgcagagctggactccatttgtccttgagaatatcgaggcatattctcccaagcttatcaatgttaggatgatatatctttgtaagaaatcgaaccttgggagcagccatgggatattcttcag

SEQ ID NO: 16576 - DNA, 516 bp, Gossypium hirsutum
  Clone ID: LIB3829-021-Q6-N6-B12
cagggaaataagacactttgcaaatgcatattggtttgtctgcatcttgacattgaaaaccaaaaatttaaaactcttaccacggttattgtgaaaagaagtgtgaaacaaaggggttaaattcacaaaacgtctacaaacccaaacaccagcttttagaaatgagacacaccggcctcccaaaggatcaaacacatgaggttaagggatgagagagctacccccaatttggtatgctaagactaggagtgaactcctgtgggccatgatttctaatagaacagcataatcaaatacataggcgaagagatcaccgtctggttgctgagcatgatctttagtttccgatatagactactattggtttgaccacaatcagaatcacaattccaaatttcaccatcagcaagcaggtcagggaagaatttgatctctgagcctttgcagctttcacaagttgggatttagcctgtatagtggcagcccgtgaattctcgatttgagtcccaatgtcat

SEQ ID NO: 16577 - DNA, 551 bp, Gossypium hirsutum
  Clone ID: LIB3829-021-Q6-N6-B2
aataggagacctctcttcaccaaattcataaggttttcatacaatgtgcggttactttgttctctaagcagtaaacattgaaaacttaaagcagtaacaacataggttttaaacctacacacttattaagtgctcttaaccattttattttcctacctcaaagagcccccgtacctcttgggagtggaataaacaaaagataccataccctctttatatctgctccaaaataacctcggcaccagaaaccttgaagtcagatggcgcaccctccacattcagagctttcacctttccatcgaccacgtaggctgaccatctttcagagcgaggcccaagcaaagcagcagagagatcttttcccaattccaggctcttgtggaagctcccatcaaagtccccataaaattcaatcacatctttggcttgcagtttgtctgcccaggcattcataacataaggatcattaatggcaacacaaatgactgaatcaattcttttagccttgaacttatcgatgttcttcttgtaactaggcacatgctgttgtg

SEQ ID NO: 16578 - DNA, 508 bp, Gossypium hirsutum
  Clone ID: LIB3829-021-Q6-N6-B3
atcttcaaatttttttttttttaaaataaaacgacatatcaattgaaatcatcttgacaccaggcctttacaaacagacaaagtaagaactgtttccttaaatgacccgggccccaaaccatgcaaagctcatactacctgtactgccccccttacttccaccccaaaacctgcagggttttcctccatcctctgggtaacaccaaactccataaaccaaggtactcctcttaaaactgcttaaccaaggagcggcttttgttggacaccccgctcaaaggatctaactcaaaaacagcttcatcaaacgcttttttcacacggggaaacgccctttcaagaaaggacttattttcctaagacaaaacctagatcttcaaggccaaacccaaccggttttaataccaaagacggaacttagctcccactgtaaatggtgacaactgatttgctttcaaagccagatcagcggcctttttcctgtcatcacccattttaaacccctcca

SEQ ID NO: 16579 - DNA, 538 bp, Gossypium hirsutum
  unsure (1)..(538): unsure at all n locations; Clone ID: LIB3829-021-Q6-N6-B4
gaaacaagcacacccaaaatgagtagcaatcttagttaaatcgtctaatcccccaagctgatacaaaaataccagcaaaaagtataatgtggcntgaaatgcatccataaaactggggtcaaccttactacaaaaagttttcatgtttgtaattcccagtgccaaacatgatgcacttcaaaatcaacacttaggttataatgtgaaatgcaacagttcaatagtggatttgcaaaaactgaataaaggaaagtggacgcccccatactccaatagagcaactcaaccatttggtttgaattgaaatgaaactgagcttgtctcacacggaccccaactgatcagtaacctcgaccgcttgagaattttgaacattcatttcatcgaacatatgttttatgctagtgttaagatcgccttcccactgcagttcaccgtcctcatctcctgttaagttcgctggttccagccttggtgtgcttaactctccttgacagaaattcttcattttggggcactttttcaccttcacggtttc

SEQ ID NO: 16580 - DNA, 528 bp, Gossypium hirsutum
  Clone ID: LIB3829-021-Q6-N6-B6
gaccaaaaacaaatataattcttgattgcttttttttttttttgaggaagatacagaaacacacttgcaagttgcaacaatcttttaaaaaaaaaaaaattaattggcgtttcaataaacactgcatcaggatcccaatccaactaagaaacaaagagagaagctcgacatcctgtcatgtccattccatcaacctagcgaccttggttttagagagagcaagtgtaaccaggagggggtgttttcccacatgtgacaaggagttgaagagccagtggcacataaattttaaggttgagaaccttaagtttgagggtggtgcacaagcagaccgcagcttccagctcggcaagtcctgaaagaaccggacaacattgattcaaaaccgggtcacctattccaatgtgcaccaaccctcccagcatatccacacaagcacccaatttcagtgtgtcaatggggcaagtgtccttggttggtggtgttggacagggtttcccacttggtggcttagttactggaggaacc

SEQ ID NO: 16581 - DNA, 541 bp, Gossypium hirsutum
  unsure (1)..(541): unsure at all n locations; Clone ID: LIB3829-021-Q6-N6-B7
gttggaaatagtagatatactagnaagaaaattaacaaaagggcatagaccctctatattacaaaggttagaatccggttggtcggttgagcgacaactcttcccaattagtctttttttttttcaaattagattctaatctaaggttagagttaaagatatgtatgtaaattatacaatgtttgacaacactcaaagttgctcacccttggtgtcaccgtctaccgttttcagtctcttagccgctgtgatgaattccgatatcacgtgtacctcgttcaacggcagctgcgacataaaatgctgctgcacagtattaagcatttgttcccttggtgaataagcattgatgccacccgattgtggcgcatgaataatggatcggacgtctctgtaaccgttacgattcgttgatttcatggatgcagatggaacccaaggtttcgtatgtcgaactctgggtttcgctggcctctggaactcgatgctactagcaatgtcggagccactgctcgagttatccaaatcatgatcatcgtct

SEQ ID NO: 16582 - DNA, 522 bp, Gossypium hirsutum
  Clone ID: LIB3829-021-Q6-N6-B9
tcgcgatctagaacctgagatctaccatggaactactctttgcaagcaaaaacgcaagacctcctcgaccacttccatctccctaagggttgatgcctttgagccacatcaatgagttcggctacaataagatcacagggttcatttggttgaatcaggagaagaccgtcaagtatttgttcaaggagcttgggctctcgtcttatggtgctgaaattacagcgtttatcggagatcgtcagttgaagaagttgactggtgttaaaagcaaagagatgatgatttggattactgtctctgatatttctgtggatgatactaaagttcctagcaaaatctgttttgctaattcgatgggcctgtcaaagagctatccggtgatagcagttgaagatgagccaaaagagatgaaatgatattttcttaatattattgattagtgaaatatcaaaaataacatatcgttcgtaaaaattgagtatactttaatttcgtttataaagtttaataatttaataaaac

SEQ ID NO: 16583 - DNA, 557 bp, Gossypium hirsutum
  Clone ID: LIB3829-021-Q6-N6-C1
tcgcctttattattctttctcaaatccctcaataatcataatctttagcaatttaaagtaaaatttcaagcaatgggtgagcaaaaaggagctaagcctgaagccgagaagaagcccgccgccgattccggcgctaagcaagacgacggcaaggttaccgccatttacaagattgatatgcattgtgaaggttgtgccaagaagattaaacggtcgattaaacattatgaaggtgtggaagatgtgaaaacggattgtggagccaacaagctaacggtgactggcaaagtggacccggccaaagtcagagataggttggccgagaaaactaagaagaaagtcgacctgatttcccctcagcctaagaaagatgcggccccagccgctgctgctgctgctgctggaggtagtgataagaaaccagacgctgggaagaaacccgaggagaagaaagaagaaaagaaggaagagaaaaagccacccaaagagagtacggtggtttttgaagattagaacacattgcgacggttgcattcaaaaaatgcgaaaaataatca

SEQ ID NO: 16584 - DNA, 477 bp, Gossypium hirsutum
  Clone ID: LIB3829-021-Q6-N6-C10
attctgaaaagcagtagcaataacttcagaaattcatagcatccaaaacaaaaataaattgcatgtaaattcaaagagtcagttttttaaaacttccaaaaatttcaaactcaaaacaatgacttctaaaatcaactaggataaaaagtctaaggaacacagtaactcagcggtagcggcgaagggagagagtgttgtttctcttccaggttgccctgcgagaaggacggttcttgtggggcaaatgaccctttccatggagacccctgtttttcttaccagcagatgtaagtcctcgaagttccctgtgcttgtgaaccggattgcagatccagttaattcttgggtcattgcggatagcattgtgtgcaacatccaccaggataacctcaaagtacttgtaagtagagtcctcattgatccagtacgagttaacaacttttgagacctcccaacttttgggcaggacgcttctta

SEQ ID NO: 16585 - DNA, 530 bp, Gossypium hirsutum
  Clone ID: LIB3829-021-Q6-N6-C11
aaacaagtaaattaaattctttaagttttgatgctaaatagaatgtttagctcttgttcccaagtttaccttagccttgccttgtttgtttggttccttgtaattatatatattacaagtgtttcagacagaacacaattacagtgtaaaattagaaactcccagaatcccgagcaatttctattattattcccatagcatctcttccatattttgctaaagctgaagaacgaggctattattaaaaagtccattatgaaatgagtttggttcaccaaaatcactcacttaggcagaagccatgtgccggatcaagtcgatcacacgagaactgtaaccccattcgttatcgtaccacgcgacaagcttaacaaaattgtcatttaatgcaatgccagccttggcatcaaagatgcttgacctgctgtccccaacaaagtcagttgataccaagtcttcatctacgtagccaagaattccttttaaattagtttcagattccgccttgatagtggccttgatatcttcat

SEQ ID NO: 16586 - DNA, 546 bp, Gossypium hirsutum
  Clone ID: LIB3829-021-Q6-N6-C12
gaatgaaagctcatagtttcatacagtttgaatacagttcggctcaaccccagataacatccttaatactaaaaactaacgtgcatattttggcatttcaataaattctaagatagttgcctctagaagattacgttcaacaaataagacagcaaccagtttaggaagttctttagagctgacaaaccttgcattgtgtgtaaagatatccgctttagtccttgtatttcattgcttctttctcaaaaccaatagtcggaaactgttttgcgtactcctccacttcttgtcggagcttagcgatttcggtttgaaagtatgtatccgactgtaaggttgctacaaaatccttcaactttgttccttccgtcttggccttgattttcaaggctaatttcacagcagcgtcgaagaagtcagctaccttctcgaaatcttcctcaatgaaacccctagatgtgagagctggggttcccatgcggataccaccaggaaccatagcagacacatcccctggaacagtgtttttattggctgcaatatgaa

SEQ ID NO: 16587 - DNA, 455 bp, Gossypium hirsutum
  Clone ID: LIB3829-021-Q6-N6-C3
aaaaaactgaagactgcatatttttaatattcccaaaaggggcctgattcttagagaaaaaaaaacccaaaataaggaaatcaaagggaccccaagggcatgtaacaaatttttcagcaacaaacaaagtttttcaaatgataagatagaagaaacttctttgccatttttctttttaatctctctggagggggatgggattaggatttccaatatctcgggagcctatcacttggcgctggcaagttgggtgcggaacaacttggcagcaacaaccatgttgctcagggctggtttcacctcaacgtacttgcgagttttgagcccacagtcagggttaacccacaaaatgttggtctcgagcacggcaagcattttgttaattttgtcaacaatctcttcggttgatggtattctgggagaggggatgttataaacaccgggtccaattccag

SEQ ID NO: 16588 - DNA, 528 bp, Gossypium hirsutum
  Clone ID: LIB3829-021-Q6-N6-C4
gaagatgaaaaacaaccttcattaattttgtctaaaaataagcaattacacacttcaacttcttcaaacaccattaatgcttcaatcccaacaatcaaacattcaccatatctctagcatagcactacagattattcaacaaactcaaacccattatcgtcttcctctagtgacagaagataacttttagctcacgtggggaagaacagtcgtgcatgagcgaagggctatcatgggcgtaagtaaatgtggccggacaagcatgtttgaaaaactctgaatagctcgaagccctacaggtttgagggctattgtaatggttcctgcagcaaagctcgtcggttccgaaggcagcacaaccactcttacaacccacaactggaccatgaggaggtgacctatactgtaacttgccgggacacgtggccagaatattagccctgcacccaacgacgggacaaaggcctttgccttcgtgcggggtcacagtcatggggatgttaaaaccgtccacaaggctgacttcgt

SEQ ID NO: 16589 - DNA, 559 bp, Gossypium hirsutum
  Clone ID: LIB3829-021-Q6-N6-C5
aaagaaaaaaaacattagtcaatttttaaaaattatgaataaaaacaacttaaatatacatgaatatttgggtccccaaatgctccaagagcttcaacttgaaaaaaataaacacatcaatggagtaattgttggtgaccttaatgagaagaaatcaaatgaggaaaaaaaaaagggggacatatttagtaaaaaatcaatacaccacttagcaagcaataacttgtgcttcattgttgagcaatcagtttgtgtagagaatgaaatgggaaggtttgacaatgctacactgtcaaaccacaatttccttttctgtttctttctcttcgtcgttacttgtgaacatcaggtctctgtcgagcaaatcccggctgaggtagcatagagggagatgcaacaggttttgaaatgacatggcttctagtttttcttccattgagtgtagtgactgaagggctgttagctgttgttatatcccagaaacttctttttttggctgtcggaactggtgatcgaaagcgatgacttgggctcttcaattccccaaggtttggttcct

SEQ ID NO: 16590 - DNA, 455 bp, Gossypium hirsutum
  Clone ID: LIB3829-021-Q6-N6-C6
gaaaagagaaaagggtccatgccattccactaattttacttccaaaactccaaacatcatcaaatgaaataaaaatgtcaaaaacaccgaaaacaaaactgatacaaccactccgcagaaactaaaatttactgcgacacacccaaccacttggagaagttctcgaactctgtgtaatcgctgtcggagatcatagtttgataccatgctttgccagctgacttgattgcggttgcttcctccttagatataggcttcctcttcttgtcaagcttctccttcttggccttaacacgctgtgcctcagccaaaagagacatccttctagcagtctttgcgtaagggttcaacttcagcatagcattcaagttcttgagtggattcttcttcaaaggtgccctcttgatctccttcttaatcggcttaacaaccgactgaacctcgtcggagttaat

SEQ ID NO: 16591 - DNA, 524 bp, Gossypium hirsutum
  Clone ID: LIB3829-021-Q6-N6-C7
aataaataaaaaggtctgaattaataatcatcaatcataatacaatacacacacaggaaccaacaatgaagaaacattataaacacaatgagacaaacatattgtggttttcttctctttttagcttttaattgctggggttgctccggaaagatcccaaagccttaatagccgccgctctaaggatgtactgatgatatgccgccgccgcaagtgctcccaccattggtccaacccagaatatccagtggtcatcccaagccttgtcgttgttgtaaataacggcggcgccgaagcttctagcagggttaataccagttccggtgataggaatagtagccaaatgaaccatgaacactgcaaatcctataggaagtggagccaacacgggtacatgtgaatcacgggcacttcttttagggtcagtagctgaaaaaacagtgtaaacaagcacgaatgtcccaataatctcagctcccaaagcagtccctttgttataaccagtcgccaccgtgttaacaccg

SEQ ID NO: 16592 - DNA, 548 bp, Gossypium hirsutum
  Clone ID: LIB3829-021-Q6-N6-C8
aacccagaaaaaaacagcacttatcatttaagagtactcgacaataactaacaacaacataacaaaagcaaaagcaccaaacaaaatgtaaaacaagctaacagatgcttcaaaagtaagataaatctactgatcttataaaaacatgttaggcttaatcaacttcctccatcttgctgccttcggcatcagcatcctccaatgggggcatatcagcatcaccttcaccttcacctgcatcctcatcaatgctcaagccgagtttcagcatcctgtggattctgttgccaaaggtgttaggctcatcaaggctgaagccagaggtgaggagagcagtctcgaagagaaggagaacaaggtccttcacagatttatcattcttctctgcatcggctctctttctcagctcttccatgatggggttctccgggttgatctccattgtcttcttgcttgacatgtaaccagccatgctgttatccctcaaagcctgggccttcatgattctctccatgtttgcagtccaaccatactcgccagtcactaaa

SEQ ID NO: 16593 - DNA, 501 bp, Gossypium hirsutum
  Clone ID: LIB3829-021-Q6-N6-C9
gaaaaaaaaatgaaggggcaccctttaaattaacccaaatcatcaattacttatatgtctcattgtttcgtaaagggtaggtttgtttaccaattcaaacaaaaatggaaaaaaaagtgaaaagggataacccaactaaatccagtttaaaaataacattaagaaagaaagcatagcatgtctgatttctctttagctacctacttaatgtactgagaaacccacttgaaaccatttccataacccatttttcggacaatgctacacatgaatacctcgaggggacaaacattggagtctcccaaattgaccttacccttgcccgtggtgaaattggtcaggccaaggtgataacccaactcattttccgaggcagcatatggtatatcgatcttgttacccaatatcaagaatggaacattagccaaagattcatcagagaggagagcgtccaactccttttttgactcaaaaaacctttccttgtcgtaagcatctacc

SEQ ID NO: 16594 - DNA, 277 bp, Gossypium hirsutum
  unsure (1)..(277): unsure at all n locations; Clone ID: LIB3829-021-Q6-N6-D1
agatatgaaattacaatccaaatttatttaataagaaaatcaataacatgtattaaaaaaatattaattaaatttaaacaaatgataatatttttttttagttgtggaatattgntttttagtctgctaccctagcacgtctctgtctgcctctctggcaagcctaggtttttttatgttttctgggttcgactgccgacatctccttagccttgaatagggttatttttcacatcttacgaccatggaatctgaattttgtcacctttgcccaccc

SEQ ID NO: 16595 - DNA, 485 bp, Gossypium hirsutum
  Clone ID: LIB3829-021-Q6-N6-D10
gaaaaaacagtgatccatggagagggtcatcatcatcattcataataataatcttctcatacccccaaacgaacaaatggggaaaataaaaaaagagtgaaggggagacaaagctatttgggttgatttttttttaattgggggggttgctgcggaaggatcccaaagctttgatagctgctgctctaaggatgtcctgatgatatatagctgctgcaagggctccaacaaatggaccaacccaaaaaatccaggggtcatcccaggctttgtcgttgttgtaaattacagcagcaccgaaactccttgcagggttaataccaataccggtgatggggatggtagccaagtgaaccatgaacactgcaaaccctattggaaggggagccaatacagggacgtgggagtcacgagcacttcttttggggtcggtggctgaaaaacagtgtaaacaagtaccaaagttccaataatctcagctccca

SEQ ID NO: 16596 - DNA, 556 bp, Gossypium hirsutum
  Clone ID: LIB3829-021-Q6-N6-D11
gtattaaccctacttacattcacagcttgaagaaaaaggggttgaaacatcttatatgtacataggaagggggggggggttgcaaaagcaaggccggtggagccatgcatgaaattcagattcgggtatacatatttatatgtatatataaaaataaaaatgaaaaacaccatacgctattgatgccacaacattatccaaaatcggatcagaccattcgtgcttatatctggattctgatttgtgaggcaaacttgatgctaatagcatcgcaaaccagtttttaacttgagtagttcatgttctttccaacaggacagaaattttactatgccactcctcatgtctccatcaaaaacctatagagttaccctgaacaattctttgcactagatgctgatggacagttcacttcttttgcaactgtaccttctgtgggaactggaatgtcctcaaactttgaacccaacgaccctggcttcatcttctggacctcttccctagtgtagataccaatcttgcggaccatggcacaaaattcctgccaaggatcatc

SEQ ID NO: 16597 - DNA, 544 bp, Gossypium hirsutum
  Clone ID: LIB3829-021-Q6-N6-D2
aagtcaacatttaaatgagttggccttcagtacacgataatccagtttctgcgccagagattgtgacttggccaccacattgcaatatcttttgtagccaaaacaatctgcctctggcctttgaccgggaccagagtttagggatattatataaaaaatagtctgatccggtccaacgaaatgaaaaactacttactttgaagttttatggcagcttcttgagcacagctttaagatgtggctgaagagttgtaagattggtagccatttgaacaacataatgtagatctccattaacaatcttgtaaactcgacttatctccctcaccttggaagcattggctacgacttggctatgaagcttgatgacattgtcctctgcactgtaggtccccttgagaacttccgcaaggccagtgctctgagcaatgacaacttcaagagagccatcaggtttaggacgccaataaccggactcggagtgcataggctgaccagaatcgagtttccaggtcttgtgagagtaggctatgacgggcttccc

SEQ ID NO: 16598 - DNA, 542 bp, Gossypium hirsutum
  unsure (1)..(542): unsure at all n locations; Clone ID: LIB3829-021-Q6-N6-D3
aaaaatagaaaaaaaagcataccacaaagaagaagcattacaagttgatcatatcaatgtccatcaaacaagcacaaataaaaacacttacaaacaggnggaaaatatagacttacaatgcaaatcatgtccctccctatgatggactcccaacattccctatgatggactcccaacatttaatatcaatcaaggggacacttgatgagacaagtaaccaacttacataaaccatccacatatcttcatcttgatccgggttgttctcagattttatcgagcttctctgcccgaacaactgggttggctttagcaatagcatcgcgagcagcagctcggtaatcgaaagggcagtcatgtttgtcggagtaacgatgagctgcacagaagaggtttccacacctgcagttaaatcctgtcagaccaacacgtttacagcatttggtacacctgttaggaccctctttcgttttcatcccacatgaagtctttccggatgggtcaatgggtagctctgttgagaccattttggtgtcggcgtt

SEQ ID NO: 16599 - DNA, 551 bp, Gossypium hirsutum
  Clone ID: LIB3829-021-Q6-N6-D4
atcagaaaataaatcaaatattaattatccaaaccattcagcatgaagcatttcaatagaacatggaagattaaatgacaacaaagataaatatcatctataataagaaaacacataaaaagatacaagtttggtttgattgaaaccctaacttggcaaattataatagaaagagcccaccagagactgctttgactattgttgttcttcttcctcgcgcttcgctgcttctttaatctcatcatcaccctgcatgtcggaggtccacagagtgagattgtcacgtagcagttgcatgatgagggtgctgtctttgtatgattcctcccctagtgtatccaactcagctattgcttcatcaaacgcctgtttagccagttcgcaagcgcgatcaggagaattgagaatctcgtagtagaaaacagagaaattgagggctagaccgagtcggatcgggtgagttggagccaattcggcgttggcaatctcctgagcggatttataggcagtgagagtactctcagcagcttccttgcgttcggcgctagttt

SEQ ID NO: 16600 - DNA, 534 bp, Gossypium hirsutum
  Clone ID: LIB3829-021-Q6-N6-D6
aagagtaatgtcttctgaattttaccacacgaaatgaaagtgtttgatggtatgcgccctaaattacattataaccattgaataagtcattggctgatagcagaggagctgaagatcattacacctaacagtagctcaatatcattggattggagattatccctgctgggaattgggagatctagataatacagtttcagatgcatcattcctgcaagacaatggatcttggacctgcaatgttgtctgtcgccttggttccatcatggattcctctttgctcaattcactctgtgtctgaacctgagatgctgtgatctgtccttcttgctgtcttttttcttgttcttactgctgctgcacgtaaggatggagatttggtggtggaaactgctgctgatatgagccttgcggttgtagttgttgctgctgctgctgcagatactggtgctgttgaataaattgttgttgctgcagcagctgtggctgctgatagggtaattgttgctgttgaagaattgctgttgcacttgt

SEQ ID NO: 16601 - DNA, 543 bp, Gossypium hirsutum
  Clone ID: LIB3829-021-Q6-N6-D7
cacaataccaaatgatacttatcttctttgtggcaaagcaataatgatatcaaagttgtacaaatataaacatcctcttatttaggataaaccaagatgctgtcataacatgttatacataatatgcttctataaatctgctaaagatatccaatcattcattagctacagttaaatcccaagcaaatccatttgaaccatttcccaataggtagatatgcaaaattactcatgctaggtatcagcatcgtcaatggttctcaattccatcaaagaattgtatttgtactcaaagggcaaaaaaatatggcaacgtcttcacgcattatatcagttttacttgtgtttagaacagttttcagctcgtgtaagtgcatctgtaagaacatctattgtccaattcttcatgtcctccatatgcagcggttctccagttcttatttttgcatgtggacgagcaagcttggattcaaaaggagttcttggtctgacttctctaatttcttcccactcttcacgagtaagcatccgaatggtgccttg

SEQ ID NO: 16602 - DNA, 548 bp, Gossypium hirsutum
  unsure (1)..(548): unsure at all n locations; Clone ID: LIB3829-021-Q6-N6-D9
agtaaaataaattgtgattttattatataatcgaaaaattaaagacagaaaatgggtaaatgaagggggaaaaaacaagaatagtgngaaattacagaggaaaaaaaaaaaactagagtttccgcctctcagtacaccagccaaagaattacaacgcaaaatgtggaatgtgatcaaaaccaatctagaagctcaaagcaatggctgcccatcccaacgccaaccctccaattatcttcttcatgttcttcattgcctctgctccactctcgtcggcagcgacagatggaccgggagaggaagcatcgaggctcggtccaggagctccagttggtggagcgggaggtccaagcatatcaggtgaaggagccggagcatggtgtttcttggatttcttgcttttgctcttgctcttgcttggagctggggccggaacctcagcagtagttggtgccgtaacaggagccggaggagaggccgagctctctggtggagtcgtcggtgcagcaacgggaggcgatctggctggaggagagctcacaggtact

SEQ ID NO: 16603 - DNA, 420 bp, Gossypium hirsutum
  unsure (1)..(420): unsure at all n locations; Clone ID: LIB3829-021-Q6-N6-E1
tttttttttttttttttttttttttttttttttttttttttttttttttttttttttttttttttttttttttttttttaatatgggggtggggtttaaatttattttttttattaagttaggggggggggtgggaactgttaaattgtaaattttaattaagaatgaaaaaataaaccaataaggtaaaaaaaaagaaaaaggaaaaaaaaaaagcaaaagaaaaggggggagggaaggaaaaaacaaaaaaaagggagaggggggagaanaaaagcctaaaagaaataaaagaaaaaaaaagagagaaagatttaaaaaaaagaaaaaaaaaaagataagagagagggtcaaaaacaaaactgggggagaagaaaaaaaagcaaaaaaaaaggcgtttgtgaaaagaagagggggaac

SEQ ID NO: 16604 - DNA, 510 bp, Gossypium hirsutum
  unsure (1)..(510): unsure at all n locations; Clone ID: LIB3829-021-Q6-N6-E10
gaagatataaattctctttatatagtcattattacaaataaagttacaattngaaaattcaaccacgaagagacaataataaaggagaaagacaccataaacattaaatcataagcataagtggaacactgcactgcagcataataatatctcaaatctcatcttcaaagatcttcaaaaacaccaaaaatattaccatccatgtaattgttatctaccaagctcaccaaatagtagctgctctgaatctcttcgagcaaattcttagaaggatcaccatctgggtacaaggtggaccatgatcgagaccagatttcaaatgcttcgtccttccacaccacaaaactggcaggatccaccacagttggttggattatttctttagcagggaaggctccccaagttactgcattcacatctgtgaggccaatgtttgataacaaattcccctttttgttgacagcaacataggtcaatgatgaaaaaggattgcaatttttcactagtgca

SEQ ID NO: 16605 - DNA, 557 bp, Gossypium hirsutum
  Clone ID: LIB3829-021-Q6-N6-E11
gattcgtacgctaaattaatattaagaaggaaaaaggaaaaacagaaaggtaaagaagaagaagagaaattttgcagtactgttatggtttgtgtgtgtttacaatagaaaaggttatatatgaggtaaaattagtaaaaacaaaatcaaagttctagtaatcttgagcatagaagtcaataatatcgtggagatcaagttgaaacaaagaagaagaatcattgttcatcaaccacagcatgtgctcaaacaagatagcatccacgtccacgaatatcaccttctttttcttctcccttgttgcatggctgccattccctttcttcaatgtttccatcaaaacccggaatggattctcctctaacaccaaagggtccacccaaaattctcgtttctctttccctaccaccaccctcacttgtggctccaactcgcgcgttagacgccggtagcctagccgtgatcccatgctgcgctttcccaataagcaaacaggcaataccaagcaatccatgagttatgggtagggaaatgaagtttttataaggatgtgaaaa

SEQ ID NO: 16606 - DNA, 456 bp, Gossypium hirsutum
  Clone ID: LIB3829-021-Q6-N6-E12
caatgagtaattcgactgcaaaatatatgttgcaactctcgttgaataggtgctcgcaatactcgtttctcaaaggaccagaacctttatacccacacatcttcaaaaaaccatcgcctctttgcagttgatgaaagcgtcccaacatgcatgtccggaaagcccaccaagctctattctttatttacatggatcgggtactgtgaagagcttttcttgtccgtgatgtgaaacgtgagatttactctaagagcctgtgcctcagagcagtgcataccggatggagattttttaaaaaaaccccttccacgatatgggtctggcctgtctacattgcaaccctaaacgctgtcatatgaatgggttaatttgaacagctgaacctatggctgtcggcaataacaactctaagaactgcgcacagccctgactatttaattgctgtcgttcccacca

SEQ ID NO: 16607 - DNA, 553 bp, Gossypium hirsutum
  Clone ID: LIB3829-021-Q6-N6-E2
agttcccaggctttgataaaatataagataaacaatgtcgaaatgtctccacttcacccaaatcatttttttagagatgttactctttcagcaagctttatacattaggtatcctaataaatttggttctagtatttaaccttttacacagacgggcattttcgcctttgttgtgtacaaggcagcagaacaataaaaaaaaagacctcaactgcctcttttgatggcttgatgctaacccctgcactggcaattcttatttgtcccatgttatgagctccttccaatgtccttgctggtgaaatctccacccccaaatgaagttgctgctgcaacaacatcaagttcatctccaatggaggtaattagagctgacaggccaccattggggctgccaccagcagccattcccaatccaagaaaatccagagttgcttgcctaggaccaaacacaggagttcccatcatcaattcctttaatcctgaacttccatcacgaggaagcccagggccaagccctgctacaacagaggtattctcaggctcaacttct

SEQ ID NO: 16608 - DNA, 552 bp, Gossypium hirsutum
  unsure (1)..(552): unsure at all n locations; Clone ID: LIB3829-021-Q6-N6-E3
aaggattgttgatatacttttanacttcaaatatatatcaacaatccttaaaaaaactgtcccacagctctatttttggtagtcaatattgtagcaaaggaaaacaggagtaaagggacaccatgtattcagttttcaaattgcacacaaattaataatatcacacacagaaaaagaaaagcaacaaatggagaaaattcaacacaaattgcactaatctctgtttcatgcagaatcatctttactctagcttctccagctctcccattctctctattatagcctttttgcttgtttcttgaagctctccagcaagaatgaattcatcgagtatcagatagaccttgtgaaaattgaaaaccaagtcaagctcacaaacattgctgaagaaatgatccaatatctccacaaataaatggatgcattccaagtatgccaactcgttatcggttatgtcaacacacaaggagaagaacaatccggcataccgcctgtaaattaccttatgcgtacgaaactcaacgaaattggtaaattttggatctctattaa

SEQ ID NO: 16609 - DNA, 542 bp, Gossypium hirsutum
  unsure (1)..(542): unsure at all n locations; Clone ID: LIB3829-021-Q6-N6-E4
aaatacgattataacaangagaaataatacgattgtgtgcagaatcaattcacatacaaaatgcctaacaccgttgatgaatacaagatttgacgtggaacctaagctgaaaaactcgaacatttattcgaggaaaaatattttttcggatcaaatcgagcttgtaaatggctagaagaatagctaattacaaatgtaatatgaatttaataaccgttcgaaccgtccgggaatttatcgggtctttacctaggagatttggaagagagacatcttccacaagagacgagcttcaataacagagccggtcttcgtgttctgatcttcaagcgcttccgacgtgttgctttagatgttttccagaaaagtaagcttcttgaccttggttcgagtctcaggttctcttgttcgagcttttcggcaatggaaactgctttgtgatttgaccatctgntctcttgtgtatatccatctccatgaagaattacgtgtgcaatggacagcttacttctaacaatgctctgactcggggttagttcccc

SEQ ID NO: 16610 - DNA, 552 bp, Gossypium hirsutum
  Clone ID: LIB3829-021-Q6-N6-E5
catatataggtagactgatatacatcacaacacttggttacaacacaaataagtaataatcatctctagcatacaccccttttatttggtacaatgaaaatcattgcccaagaaaaagaggttcatatgctgagattaaaattctaaagctactaaatgcagccttttaaaggtggctgcataaaccaggattggaataaacccgttttagcagatggcataaatccagagttaagacatactgatggatactaatattactgttccttacctcagtcatttacagggctatgctactgagactttgtatgcaaagccgccacacttgagaccatggagtccactccacaaacattgcgacctctgcatattttgtaatatccgtcctctccccagtttgctccccatgaattctttatgatccagaaaggcttgtccttaaagcggatgggggagtaaccagcagctccgtaccctaccagaagaactccatgatccaaagttctaaagcaaatgtaaggacatgaaactcctcccatatatgtctgcatg

SEQ ID NO: 16611 - DNA, 521 bp, Gossypium hirsutum
  Clone ID: LIB3829-021-Q6-N6-E6
gctcctactgttaaaattcatctgtatatatcatataaaattacaattactaatgtatttatacaactcatatataactgattcataacaaaagaaactaactactctaactgcatcaatagcctacaactctttctacactccccctcaagttggaggtataaaaatactttctaaccccaacttggaaatcagatgactatgctgttgtaaccccaaggctttcgtcataacatcaaccaattgttctgctgttgatacatattcagtagctataagccctccttgtattttttctcttacaaaatgacaatcaatctctatgtgcttagtcctctcatgatacacagggtttgctgctatttgaagggctgctttgttgtcacaaaacaatctcactggttcagttacacctatatccagttctctaaacaaacctgaaatccaacccagttctgatgttacagctgccatacttcggtattctgcttcagcagaagacttagatacagtacactgtt

SEQ ID NO: 16612 - DNA, 443 bp, Gossypium hirsutum
  Clone ID: LIB3829-021-Q6-N6-E7
ggttcaaaactgttgaaaggaattaaacattcattatgaacttgcatgcatcatactcagcacattggtttttctttttaaaattttattgccagtaaaacatatatatatatatatatataaagaagcaaattcatatgctctgttactaccacacaagactaccttagatgagttgcacatccagtttgtctttgccagtttagcaactacgaggagacgctaggcgtagccaaaatgtcggcaccatgattcaacttttaagatctcagcgaggccgtaccccaaaattattggaactgaaaaagcagccattctctgtatatccgcagatcataacaaaatatccgggaacattgaatctcaagagaattaacctaaaaaggcattattgagtatcaacgcctaagcggttttggggactttattggggaagatattat

SEQ ID NO: 16613 - DNA, 377 bp, Gossypium hirsutum
  Clone ID: LIB3829-021-Q6-N6-E8
cccaaccaacccggcaaaaaggggaaaaagggaaggcacaggccaaaccaaaccggaaaaaaccgacgaaaaaaaaaaaaaaaaaaaaaaaaacaaaacaaaaaaaaaaaaaaaaacaaaaaacggccccaaagtccatttccaaataccccgcccccccccggaaataaggggaaaaaacaaaaaaaaacacaccaaccaaccttaataaaccaaaacacgcacctgaaacaagacaacccgggaaccccaatcaaaaccaaaaaaaaaaaaaccacaaaccaaaagaaaaatgggggaagacccgggaggggttgggcccgcaaggaaaaaggaaaccacattgaccagggagggccggggaaaaaaaaaaggga

SEQ ID NO: 16614 - DNA, 539 bp, Gossypium hirsutum
  Clone ID: LIB3829-021-Q6-N6-E9
acgtggtagctgattatctataagcttttttcggaaagtacatattgtgtgccgcaatacatatagcctataaacaacccaattttgatcagtgcacattacaaaagattcaacacaccaacatcaaatataatacaatatcacattacagaaagaaaaaaaaggctaaacaaagttccaacttattttggcaattagtatcatttactcgtgatttgcacattttgatcttattcgatttgatgattataccaaattcaatgtaccatatcagaagcgatgccctttgtctgccaaaccaatattcttcatagaaattcctcggctcttccccctttgcccatttcagctaacctccatcatgacttctttctttgcacattcgaaatcctagtcactgaacgtggaaaaaatagagaagacttcacggttgtgcttgttttcccagcctcggctctaagaattgagtgagtgtggaaggactttatatgggttgagtatcccattggggtcaagcaacttttttatagaagccattg

SEQ ID NO: 16615 - DNA, 546 bp, Gossypium hirsutum
  Clone ID: LIB3829-021-Q6-N6-F1
atgaaagcttgttcttaactggattcatcgaaatgttgggtttcttttgagcgtttcgattcaatcccaaagtaactcacgtaccatttcacgaattttctcaacccagcagctaaatccgtggtgggtttatacccaaaatccttgtaagctaacgtgacattggcatgtgtgtaggggacatcaccatttctgggcaacgaaatcacatgtttcttggcttttgtgttgagcaatccttctaaaatcgagactaatcggccgacgggaacaggggaagtatttcccaagttgtaaacccttaattgagccggtcctttcttttttccgccgctaccggtgcttttttccgccgtgtctaacgctcctaaacaacctttcacaacgtcgtcgatgtaagtgaagtcacgcgccaccgctttttgatcttgggttctgtagatatcaatgggtttcccttgaagaatatctttagtgaaaaagaagtaagccatatcgggtcttccccatggaccataaacggtgaaaaatctaagtccggtgagg

SEQ ID NO: 16616 - DNA, 539 bp, Gossypium hirsutum
  Clone ID: LIB3829-021-Q6-N6-F11
atcataaaagggcaaactatgattcaaatatatgatgatagttcaatgtcaaaaacccccacttcaagggtttttatatacacaaggggcataagatttctcacaaaagcttcatcacaccctgcaaacaaaatggttctctacactccaaactctcgctttctacagttgaaattaacactaccaaaatcaataggaaaataagaaaaaaaaaacaaaacaaataagaaatgcttgcaaaacaaagttcttttatctctaaatgaaaatgaccaaaaccaaagattctacacctctaacttgcttcttcactgagctagatgtgacaccaacttctaaacgtgactaggctatagctctgcaacacgaaataataaatccgaacatatatcacggttgctttggttcgctacactgtctacatcaatgctgttggtcattcaacagttcacggttcatcttcggtgagttgtacgttgaatccatgctttatgtctttcattgagggtttcttgaatttagctttcctttcatcttcg

SEQ ID NO: 16617 - DNA, 506 bp, Gossypium hirsutum
  Clone ID: LIB3829-021-Q6-N6-F12
aggggctgaagaaccaaacatctatcactcaacataatccatcctccaatatttgcgtatatatataataatatgatgctacaaataaaaactcatagatcaaaataaaaatagatgggtgcatgcccaatatcatattctgtcttggcttttgagggtttgtaagtgatggtatctaagcaaagaaacagatgggatcaaaatgcgtacgggtttgataatccagggatgtaagtccgaacccagcaccagagagtctcatttcacttcttcccgcctccggaaacattgaacttaaagaatattatgtctccgtcttggaccacataagttttcccttcctgcctatattttccagcagccttgacagctgactcactgccaagctccttcagatcttcaaatttcatgacctcagcacatataaatcctctctcaaaatcagtatgaatggctcctgcagcttgaggagccttggattgccgtctaatttgccagcatttaac

SEQ ID NO: 16618 - DNA, 552 bp, Gossypium hirsutum
  Clone ID: LIB3829-021-Q6-N6-F2
catcaatgtatgaaaaaatatgaccattcaaatattttaaatatattgaaccaatacccaaaattaagacttcaatctaaatctgaataatatataatatcaccgctactttactgctttgaaatatcaaaaagttgctacaaaacccttgtgcaatggtctatgactctatatatacaccagatttcagaacaaaaaaggaaaactcaattttttgtgaatcaaaatttcctgatttacacttcttcaccatcatcgtcaagaacatgctctctacacatgggacaagttccttgcctgcttagccattcatctatgcactttaagtgaaagatgtgcccacatctgggaagatttcttgccatttctccatcctttaatccctgtatgcaaattgaacaataagattcctcccttgatttgatcctctcaatagaatgaaattcctgcattggaagcttttggatacaacttctagataaaccctttcctccatttacatcatatatgtctgagatttctctatatgtcgagtcaagtgaattcatttgc

SEQ ID NO: 16619 - DNA, 535 bp, Gossypium hirsutum
  Clone ID: LIB3829-021-Q6-N6-F3
gaaccaaggaattatttttcataactaagtgagatacaacaataaattaacagacaagagggattctctgtttttcttcaatgtagaacttttatatgaaaacttaccggaaaaataaatgttcctccgattttccaacaagagatgagcctttatgctacagcttcacatgaccaatgcctcctctaaatgaaccataaagaggttgagatcttctaaagctgaagatatcattgatttggatggtatttggttgaactgcttcgcttttctgcgagtggtattcggccaaatgttggttcccatgcacttgcacgctaagtgttttctttcgagttgcaccgactttcacattttcattgaagaattctatcagttcttgttgtgtaagtttctttaatgctgcaacctcagcttctctccgatcaaacttgagcgtcccatcagtgatctctcgccagtaaaaccgagattcttcccttaaattcttgtgcttctcgagcttcatatcaatcaatgcatttacattgctctt

SEQ ID NO: 16620 - DNA, 545 bp, Gossypium hirsutum
  Clone ID: LIB3829-021-Q6-N6-F6
cttcacatgcacgtcactatgacttaattcatggtctttacataatgtttgtggacaatacatgagatttcataactatttgaaccttttattccctcaaaatttcgtgaattgtaagcaagggaagatcatgtcttcaccaaacttatccaaatggtatagaaaaatagttgtatatctttgtaatttacgaaccggaaaggaaaggaacttgagctaaagtcgagggtaaggaaatgtgaaggttattaaccgctaaataagcagcaataccggcagcgtaaccggcaaaagcaaaaccactcacctttcggaaataccaaaagaagtcgattttttccattcccatgtatgcaactccggctgcagacccgataactagcatggatccaccagtaccggcacaatatgcaacaagttgccagaactcggagtcctggggaaatgaagtgagatcatacattcccattgttgctgcgacaagtgggacattgtctataattgctgacacaactcctattgcacttgcaatcagttcaacgcta

SEQ ID NO: 16621 - DNA, 551 bp, Gossypium hirsutum
  Clone ID: LIB3829-021-Q6-N6-F7
cgatctcaaaactttgacaactatttatgtataatatgcaatggttatcattgtcattcaacatcacatataacttaaagagttgacagcacaagaaacataggatgcaatatatcagagtatcagactaacattatagataatatgacaccacctatataactaatacttcatcgggtagctcttccggcttagaacatgatagaccttttaattctcccggaaactctcgtagctaagacttaaaaaccgtggattttgatgctatccttcttcacaataccagcctgaacgaggaaagtggagacgttcttcctctgatctccttgaagttgaataaccttccctaattctgggtcctggacaacagtgccattacaacaaaattctttcttgaggtccttgagaattttgttatagctaaattctttcttcaatccctgaacagtggtcaggcttttcctaccgttccgctgctgaatacgaatgtgaacgtattccttggcaccagcaccagcgtcttcagcatttgcatcagcaaacggatcaaa

SEQ ID NO: 16622 - DNA, 483 bp, Gossypium hirsutum
  Clone ID: LIB3829-021-Q6-N6-F8
tttttttttttttttttttttttttttttttttttttttttttttttttttttttttttttttttttttttttttttttttttttttttttttttttttttttttttttttttttttttttttttttttttttttttttttttttttgggggaaaaaaacgggcccccaaaaaaaaaatttaaaaaaaaaggggaaaaacaagggtgggggcattaaaaaagaggggaaaaaaaaaaaaaaaaaaccccaaaataaaaacggggataaacaaaaaaagggacataaaaaaaaaaaaaaaacggggggatttaagggaaaaaacaaaaaattgaaaaaaaaaaagggggagggggggcaaaaaaaaaaaaaaaaagggggccaaaaaaagggaaaaaaagggggccaaaaacccaaggttttaaaaaaaaaggggggggggcaaaaaaattttaaaaaattaaaaagggggattttttgggggg

SEQ ID NO: 16623 - DNA, 529 bp, Gossypium hirsutum
  Clone ID: LIB3829-021-Q6-N6-F9
gcccccgaatgcaatgtggaatcaaaattaataggtaaaagggaaggaaagaagtgtttagatgaggtggcatgatagcaagagaacaatgggccatttattcttcaacgtctaaaaagccaattgctgtcctctaagaaaaaaaaactcatacaccaaacactaggaaccctcacaattttcggattcctcgtttctactcactattctttactcttatctattcatataatataacgtcactgtgagatcacaactcatccttcaagccaccattgctgctcttatcactctccttcgactcctcaacctttgtttctggggttgatgctgcttcagctttgggtgctgacactggtttttggagcttgaatgggattgatgcatgtttctttaggaacttataaaatgccacgacagttcgatcagtgtccacagttatgggatcaaaactcttgtttcctgccgggaagaacagaattgtcgggaacccatcggactttgccctaagatgttcatttgttgtacc

SEQ ID NO: 16624 - DNA, 416 bp, Gossypium hirsutum
  unsure (1)..(416): unsure at all n locations; Clone ID: LIB3829-021-Q6-N6-G1
aatactangaaataataatattatccaaatgcataattaatactaatacaacataataacaacaacattgtccaagtgcataactaatattacaccacataaaggtatcaatatcttcaaccttgagaaaatttttgaagccaaatttttttatgcttcttacttttaactaaaaaagctttggcctcggattcatgactcactagataatcaaacacagaacacaagacgtcatcatcaaatccttcttcctccatcgacatcacttgttcgtaaagccgtggtgtcttatctcttcagcctcttcattgtcgcagtctacaggcactgaatcttggttactgtcatccaaatctatgtcagcaaatgttctggcaaaactccctgttgccatatctttgccaacaaccaaagcc

SEQ ID NO: 16625 - DNA, 551 bp, Gossypium hirsutum
  Clone ID: LIB3829-021-Q6-N6-G11
gaggaagaaacaaataaaatggtttatttttaacaggagataacctcccaaagatgatctttaaaaacaagaaaaattacaaatgagattaaatattttctcacaaatatataatcacatgaaataactaaagggtgcttccccttattattcattcctagtttcagccgacgaaaacaagcccccctccctgtaaaaaaaaataacctatgatgccactaactagttaaatcccaagagttgcagatgttgtacatagtgattaaccaagtatctcaacttttattaaatctttgctactcagcaaaatcacattctccgtttttggaaaagggaaactacaactatgcactcttttggtcattcttgtctttaagaaaatgatggcatcacataccagaataggcttttcaacatctgaggcgtttttaggaccaagaaaaaggtcaaaaagaaaacacatcgggaaatgagatccaaataaaattaaggataagaatctgggttaactttttcactgactgtagaaccaaattgtggaccgcccttac

SEQ ID NO: 16626 - DNA, 467 bp, Gossypium hirsutum
  Clone ID: LIB3829-021-Q6-N6-G12
acaaatcgatcaaataggcaaccgttttccatttcaatggggcagttacttttaaaactggtcttaccaaattctatcttactttttcttgagaaaggggaaaattttcctatacaaagatctcaagctttaaaagagactacaatgttgaataaatactatcattattgctgaaaattgtacataccactaacctttgacgccacctccacttaggtttaggtttgcaaaagattaaggtttaactccaataggtccaggtaaaccactcaatttcatcatacataaatacttacttggaacaatagcacctgcctgtgagcacagatcgaccaccgctggtgcgtgcccgtagtaattccgaccttcatccaaaagcacttttggatcctgaggccgtcgccgccacacaatctttggagggaccaaattgtcaacccttgcctttatccaataatgggttccac

SEQ ID NO: 16627 - DNA, 528 bp, Gossypium hirsutum
  Clone ID: LIB3829-021-Q6-N6-G2
aaagctcaaatatgatgcaagcattcattcacgtaagaagacaccttaagtagaagttgaacattttatcttatttcacattgctcactactcataaaaccatgcagagaaactgattctctttttaagttcttgacaacattactaacacccattagctgctataactatggatatatatcatactatctcctgacttttcaccctcaaaaatagcactactgacttcacgtatggcaggtcagtttgttttccgccggtcaagccaatggctatcgagagtagacaggtacttggacttggttgtctaagaaaacaggttactaagctttatccatagttgccttctgattatgctcagggtgtggcaacattttccttggcaagaggagcaacctcctctccttcaatgccaggttcactgccagccaccccgaggctcaacaacatcttctcccacaaccttgatggtcccttccatgaaaaatcttgtgccatacaattctggatcatttctttcagtgcttg

SEQ ID NO: 16628 - DNA, 507 bp, Gossypium hirsutum
  Clone ID: LIB3829-021-Q6-N6-G3
agcctgcggttgaattttaaaatatgttacatgatctacacaagtacatttaacagaagctagcaaagattaaaaaagggaagctgtttatatttagacaaaagtaccgggccctaggttttataatttctatcattggacgtcccactcttcctcattcattctctctttattactacttacaggtataattctcaacttcagtcgtctcgtctcagatttttataaaaacacaataaacagaacagcttctgctccaagtatgccatcatagattttgttggcagcaggagattcaggcaggctgagtaggtagtacgctaatagtgtaacctttcttcgtttctaaaatgtaggctttcaatgcccctcacagcagactctaaattatttatatttgaggggttcctaccaaaagatggccgcttgttctctgatgataaaacaggcgagtttctttgcccactggagattttctggaaaggccctgcagttgcatcggttgta

SEQ ID NO: 16629 - DNA, 536 bp, Gossypium hirsutum
  unsure (1)..(536): unsure at all n locations; Clone ID: LIB3829-021-Q6-N6-G4
ggaacaatgattctttttttttttcttttacctttttccttttctttacaaattatcatgcaaattgcaaatcctatttacaggataattggtcagatcctgctcatatcatcttacaaatatgctacatttcctaacagttcgtcctttcttcagtctgagcatcgaccatgtttgaacatacacaaaacatgtcgttttcgaaagccttttggggtttggtttccaccaatgggttctttcgtgccgctgagagagaatgctaaattattgtgaagtggataaaaatctaaggaaccgttgtattcttgcctgattattgcgtgatctgcgccgtgatgaatttcttctacgaaagaagaaatcttcagtgtccaatacataagatatcttgtatgagttgcaagctatcttgttctctaaaccgttaaccagttcaacgccttccatggccatgcaagtagcatcaaattcatctagatttgcgnagntcttcttggttctctttagnatgatgccatgtgggtctttctttc

SEQ ID NO: 16630 - DNA, 545 bp, Gossypium hirsutum
  Clone ID: LIB3829-021-Q6-N6-G5
cgcactagaaacgtctttaccagctttgattatatgcaaaacagtaaacaactcttactaagttgacagtaaatttcttgcatcggaaacgaaatgtacaaatcagatcagtacattctcgaccaaggtctgctgccacatggagttgctcttcctcagaatcatatataggttgatgccaagatgctgatggggggcactaaatcgtgacaacacttaccttctcaaagcaccataactttttgttacccgaggttgaggtttattaaatctccgagcaatctcttcagcatcgtcgtcgtcgtcatcatcatcaagcttgttcatgaacacactatgaactgaagagttatcagatttctttccccgcttagatgtagtgcctctacctcttccccttggtgcagctcttttgcgtcccctacctttagtaatttcatcatttttgttttccgaactgctttcaacctcattaatttcatgttcttcacttgaagcagagtcaacgttctcctcatcatcagcaatactttgaaccttaaccg

SEQ ID NO: 16631 - DNA, 308 bp, Gossypium hirsutum
  Clone ID: LIB3829-021-Q6-N6-G6
aaacattaatatagagaagttgatataattcttaaaacggggaacattagttacctaagatggtaatgttcccaaaaataaaccagattttttcaatacatcaaaacataggttgctgaaaacataaaatatagcaccagcagaagctgttaaacatcggcaaaatactatcttaatatttgatttagtcgacttcttctatcttaggtccagcaccgctgccaccggtaggtggggcatcctcgtccatgccaccacccatgtcagcccctgcaccttggtacatcttggcaatgataggattgcag

SEQ ID NO: 16632 - DNA, 543 bp, Gossypium hirsutum
  Clone ID: LIB3829-021-Q6-N6-G7
aaaagctcaacatattgatgtccattgaacaatgtgcattgtcaacagcaatattgtaatttgcctaggcaattcaagctcagaaacacaacaaaggctactcttgcttgcactgcataccgaatccttggctgtggatggcagcggaacaattaatatgatgcaacaaattggaaacaaaactgcacgaacaaagctggaacatattgaactataagagtacaagaccaagttctgatggtctcaaagcatttcgtatccgataattatagaggtagtagtgaagttgcccatcacctggtccgaatttcaattctttgaggaatgactcattatgcatgacatcaagcgcattgaaaacgtcaaaatccttctgcttagcaacgattaaagcatcattcatcagctgaagcaatggagtcttagtggacacattgtagtatgagtaggctgctttcaaaatcgaatagttctggttgccaagaatagacgagggaagcgtgtagaagctgcagaagtcagttacgtcatgcgactctgggc

SEQ ID NO: 16633 - DNA, 544 bp, Gossypium hirsutum
  Clone ID: LIB3829-021-Q6-N6-G8
ctggtaatggatcctaatcaatattccatgtaatgttttagttatttttcatagtagagcaggtagacccccccaacaaagaacattgttctgtttttcttcggtgaaacctataggaaatcagatatatttgaaaacccaatgtacatttttataaatatgaacacttagtttaaaataataatggcaaaatgattgaatgctagtttatctgaagctctcaatatgtactatgcattattgattactataaacttatatacagatgttcaaaagaaacagagtcccacctcaaatgataagatgcatttacccgtagtaccaccgtctagatcgtaatcggaatagcaatggtcttctcaagaactttcacggctcttctttgtgtattatgcagtaccaaaatgtataacttaatactccttaaagaacttatggcagtactacaccagatgtgagaaagtgaaatcgtcgcttcggcattggtttttattctatatttatcgcagcagccatgtttcttagcttctgagatatttctgaa

SEQ ID NO: 16634 - DNA, 552 bp, Gossypium hirsutum
  Clone ID: LIB3829-021-Q6-N6-G9
acaaataaaggagggaaagaaaaatcattgaaccaaagtatcaacaattacaaccgagtaacaaagggaagttcaaatcttcaaacagggtcgaaactcggaacatctctcacttcttttgcagacaccagatttagcatgctggaacttcaacataatttctaataagaatgccttcaaactgatagaaccatatgtacttaatctaaataataataattacaggaaaggaaagaactcatcatcaatgcctactagtaactggtggtaagttatgagattggacaaattggttaagattctttctaagcattttagtcccttgaagtccatgactctgcttcataatgatagccataatggttataatcatattggggtggaatgccatggtgatagatatcttggggtggagaggtggtgggctgatgatagctatggtgaggaggggaggttggatgatatgcatgatgaggtggggaggggggaactgatatcatctctgctttgggccttgtcggcataagattggtgtctatcaactctaacttt

SEQ ID NO: 16635 - DNA, 547 bp, Gossypium hirsutum
  Clone ID: LIB3829-021-Q6-N6-H1
aaattaacaaacgaggtcggattctacataatcaggtctgaataatcatccttgataaacagtcactatttaacttcactgtcatgaaagatacagccaactccacactctaaaaaacatgcaatgtttcttcaaatacactaaaattcgacaggattgggaactcaaatccaagatgttatccaatcaactttaaaacaatctccagaggactacaatgcctgttgttagtccatagtgaatctagaaactcatcagcatctggtatcaaacaaaccttgtcctgaaaagagacttggtctaacacatcaatgacttctcgtgttcttcaggtacaaacatattctccaaatttatagatcgttgttgtactatgtttcgtcctcgaattaccggtagcctcttcctcttccacgtcccccccaacctcgacccctacctcttccaccacccctcccaccataagatatgccttccaatgctctgttcacaagctgattttgcatgccaccagctccacggcccttctttgtcgcaaagttattag

SEQ ID NO: 16636 - DNA, 524 bp, Gossypium hirsutum
  Clone ID: LIB3829-021-Q6-N6-H11
catcaatcactgaacacaagccactaaactgagagatctacatctagagaaaacctaacaacacagattctaaaagcagaaagcattcaaagcaaatcatcatatacatcatttaagctctctctcctctaatcctccgagccagttgaatatctttaggcataatagtaaccctcttggcatgaatagcacagagattagtatcctcaaacaggccaaccagatacgcttccgccgcttcttgtaaagccgccaccgcactactttggaatctcagatccgtcttgaaatcttgagcgatttccctcactagcctttggaacggaagtttacggatcaaaagctcggtactcttctggtacttcctgatttctctcaacgccactgttcctggcctgaaacggtgaggcttcttcactcctccggtggctggagctgatttcctcgcggctttggtcgccaattgcttacgtggagcttttccaccggttgatttcctggctgtttgctttgtacgagccatt

SEQ ID NO: 16637 - DNA, 523 bp, Gossypium hirsutum
  Clone ID: LIB3829-021-Q6-N6-H12
aataacttattaaattatttaaaaataaaaaattttaagagaagttggcttacaagttacaagcaaccccaagacaaggaaatggcaaaagcaaagatgaaaatggagaatagcaaaaagaagagaaagttgaaagatttgtcattcatctttttatgtgttccgatggtcacaaattttagcattttattcacaagctaatttcgtgtcaaagctgctgaggcagattgcaaaagcctgaaatgcagataggggatatcgataatccatggtaaacatatctttgccaaccttcccaaactgtaggattaccttatccatatcgggtggggcagggccactggatgctggttgcgtggcagcgatcaactgaaagttcttaacggacgcaaccgttacccggccgcggaaattcaggcaccaacactgtaattgctcatgccatcgaggggccttgtttttgaggatcaagggtctcatattcccatctccatcatctttatgagacacaccaacatctgaa

SEQ ID NO: 16638 - DNA, 526 bp, Gossypium hirsutum
  Clone ID: LIB3829-021-Q6-N6-H2
cttcagtggaaattatatatcatccttgtattaaaaaaggcagatgttacaaaagaattactccctttcaacatatattttccttttgctgtttttaaactgatatggtacaaattatgtacacaatccctcccaagaaaccttttctactctttaatattaagcaatggtgcttttcttttagaccaaccgtgaaggacaaagttcaaatatagcaagaacctgaattgaagttccatttcatggctgttttgttcatgtttagagcagtgtagcatttagcattttctccaacatggtaatcgaagagactatgaccgccataaagcttcttggccaccgaagaagaagcacaaaccaattttcgattgattccggtatgtccgtatgttttactcagcttgtttcgtgaatacctgtgaaaactcttgcaaccgaaagtgcatcagtgatggtgactagtcaggtttagtgtactcaagtagcatgtgcggtgatctgtaaatcttcactagggtccagtaaa

SEQ ID NO: 16639 - DNA, 532 bp, Gossypium hirsutum
  Clone ID: LIB3829-021-Q6-N6-H3
aggtaaatatgcaaattccattcaaagagaaaccatacatagatgcaaccggtaaacaaagactagaaattatttaaaaggccattacagggcacagtccttcacgtaaaaccagaaaacccacattaagggagaccttaaggcttagaacccaccacgaagacgaagaacaaggtgaagagtggactccttttgaatattgtaatcagccaaagtccttccgtcttccagttgtttcccagcaaaaatcaacctttgctgatctggtggaattccttctttgtcctgaatcttcgctttcacgttatcaatcgtatccgagctctccacttctaaagtaatcgtcttaccggtcaaagtcttgacgaagatctgcatcccacctcgaagacgcaggaccagatgaagagtcgattccttctggatattgtaatcggctaaagtccgcccgtcctcgagttgctttccggcgaagatgagacgttgctggtctggcgggatgccttccttgtcttggattttggctttcacg

SEQ ID NO: 16640 - DNA, 544 bp, Gossypium hirsutum
  Clone ID: LIB3829-021-Q6-N6-H6
atagattgaagactttaaaacatggtatttgataaagtagcatgcgttcaaaatcaattagtgcaaactttatctgcatgactaggttagatgattgttgggtggtaaagcctaagcgtaataaaaatgcccatggtctagggatggcggatgacattgacctctggcatgtggcgataattctgcaacactgctttggatacagtgaagcaatcacgctttttacaattaaattcatagagtgatgtcccagaattgaaatcattaaatggcatctttatgaggtcctactttttaaaacatcgccttggcaacctggtgagccaatacgactttttcgtttcaaaaccatttttgtcattttcacgtaaaattgcatgctcgcttattaacttgaaccatttattatcacctagaactttacgacaacagaagatgaacaaggcccacagccactttagattattgtgaataggtgtgcctcttatgactatacgatgagcacttggtatatcaagcaaactttttgctctttgagtggtat

SEQ ID NO: 16641 - DNA, 514 bp, Gossypium hirsutum
  Clone ID: LIB3829-021-Q6-N6-H7
ggaataatgcaatacttatagttattcggacttgtatttatactttaattggattgggcttattacaattaaaaaaaaaacaatacattgatactttataacttctccaactaaacaaaggcaaaaggcaaccactagtacattaaccaaacatgggaatataaaattagtagaaacaggacccatctaattccaaatatttttttaatttccccatacaagtcccaacctggtgatgtatctcagtaatatatatatgtgagcacgcgcgcgcgcgtttgacatagatatatatatatttcaaaggggaattagacccttttgatttcaacagtttaggtttactaaacaccattcaattatctgttactatctggaaactttgcctcgtaggtttgaggtatcatgtatgttgccgggatcatttttccggcgaaccatcttccatgtaagttccgttgcgcatttattgcgccttgcgcattttcaaatcgtaagtttacaaaaccagcac

SEQ ID NO: 16642 - DNA, 486 bp, Gossypium hirsutum
  Clone ID: LIB3829-021-Q6-N6-H9
agtgtacctactgcacacattatcttgcatattaatttcctcgaaataaggacaagaacacttcacacgtcatggctgggtgtaaccttccagacggattaacagacatgaaatgcctactctactataaacaagaggcaacatcgcaccctatatgccaatagaaccatagaccgaaacaaacaacaactctgcataaatattggtatttacacccgatacaaaaagatcccgtactcgaatgcgacccttgatgggaacgcaacacctggccctaaagaatacactactaagacgagtgcctggagatagctcatgcccccttggtagaaatgctaaagaacttagccgccatgtttatagacactggcctgagattttaccataggaaacatcaaacaatggttgcatttaatgctgcgctgtagcggtaatatggagtgcctaaaaccaacgttggccctgtgcggaaaacaccgaccggaa

SEQ ID NO: 16643 - DNA, 541 bp, Gossypium hirsutum
  Clone ID: LIB3829-022-Q6-N6-A10
aaactcgtgtttcaaagaatacagtattaataccatacatatacactatgtataccgtgaaatccaaatggacttcatattcaaattatcagatcctgaatgctagtcctattctccaatctaatagccaaaccaccatcagtttactgcagctttgttccattgcacatctccttccttgccctttgcactactttcactttcaaggtcatcaaggtgccaaaaaacacttacaaaatcataagactaagtcacacaaaaaggaaacatttaaaggatctaaaagcatatttatggcttccaaggtgctggaggtggtggcggtgtgggaaacattggtggaactgcagaaaatatggtattcttgtcaattccagttgacttgtcaccagacaatgccacaagtgcagcaaccaaaccagcattgcctgcaagaagtggttcagtgtagttgtagttggtgcgaacatcgtgaaatccatcatgcttgtcaggtccagcaaccatggctcccacaagcgtattcgggtttggctttttt

SEQ ID NO: 16644 - DNA, 524 bp, Gossypium hirsutum
  Clone ID: LIB3829-022-Q6-N6-A11
agctgcgaagattctgtgcattctgctagcaaaaaaccccatgacgatattctggcctggagtgaggagtcctcgggagaattcacagtacatagtgcctaaaaactattacagggcattgaaatagatcctagagcttatgctttacaatccgactataggaaattttacaaaaaactttggctatttagtctaccttctaagatcaaaattacagcttggaaaatatcgtggaattatctacttatacgggttaatatacattatagaaagctatctaacaatacaatctgccctcgatgtggaaaagaagcagaaaccatgaaccacctattccgtgagtgtcctgggttttcgaacagactactccatcccagtgtaggattttttgttgtgctctatgggcaatttggggagaaagaaacaagagaatacatgagaaggcgagcagatctggtcagttcgagaagataaacttcaacgcagcatatgatggaaatctttgtcaatcggcagtgtggatc

SEQ ID NO: 16645 - DNA, 528 bp, Gossypium hirsutum
  Clone ID: LIB3829-022-Q6-N6-A12
cttgtgtcaatccaacatcaattaacccaaaccaaaggccagttactataattaccacaacaagattcattccatttgcatcttatataataatacaacactatataacctaataaaagctcctcctttgtgcatgttgatgttatcttctacttctaggaaataagagtaagctgcagtttagggcggttgggttggggttccacaacctccatgtggatcctcactgattgcagaacactgtaggaaaggctattactattactattgtccatctttacaatcttctgctgctgctcgtccacatgccactccccgcttcccttctctcctctgcctgtcaagtacaccgggccttctattccatatttgggcacaaacacaatgaacccgttggaccttatcttcactattctggcttctgtgtcagtgggcagttttctgaagtaaatgagagtatggagctcaacagaggccctgcttgccatttgggcattcctatgtcgataattcagattatcagcaatg

SEQ ID NO: 16646 - DNA, 537 bp, Gossypium hirsutum
  unsure (1)..(537): unsure at all n locations; Clone ID: LIB3829-022-Q6-N6-A2
gaagatactaaatatttattcgacatctcaatcacatgggatgaaacccaaaaaagaaaacacgtgcgtngaagcacatggnactgaaatcacgaaaaaagcaaaccctcttggggngaacaccacaaggaaaaaattgtaatgcaatcctaataataacattttattttaccagacaccaacctccataaacccaccctcggtggcgcagcccctaaacatcccagtggtgttaaacccacaagccacctcaccattcttcgacacagcaattaggcctgctttaccttcgttcaacctgttctttatcacataatccactgcctcatgaagattcaaccctttgtactccataaccgcagctacatcccttgccagggtgcttcggatgattgcttctccttcccctgtgcacgacaccccgcacaactcacatgcgtaggtccctgcacctataatgggcgagtcaccgatccttcctgacatcttgttcatgagcccaccagttgaagtgcctgcagcgcaccgaccctcctt

SEQ ID NO: 16647 - DNA, 530 bp, Gossypium hirsutum
  Clone ID: LIB3829-022-Q6-N6-A3
ctaaatcagagtttaaatatctttgatctttgaatttcacatgtgccctcagactgacgctagttccaatgaaattcaatggatgataaacagtatttatatatacaaagcaaaacacagcagattagagttgtatagccttacgcacctataagcctcctatactataagttcatcttccagatagttatactcaaagatgaactcagtcttgattctctgacaccatccatgttggtggtcatcatttgccacgtgaaaatcaaagtatacataggttccctgttcaaattcatcagtagcaatttttggttcctcatgccgctgaaaccatgtgttgtattttctatggtatctccaagattgcttcttcagctcctttgcagctagatattgttgataagtgttctgttgataataaaatgcaacaaacagtgtatcagtgccagtgccatatccatccatgcttatgcgttcccagaaggcaggattattcactatgggtgcctgaacttgagggtaactagcac

SEQ ID NO: 16648 - DNA, 459 bp, Gossypium hirsutum
  Clone ID: LIB3829-022-Q6-N6-A4
gttaaaaagtaattgcatgtattaaatatcaatgtacgggaaatttatacatgcatctatgcaagtgctttttccaatatacagagcagaaaccgcagctccaattctgagcaacttaaaatgttcaattattcaaaggaagccgggggcacaaattctgtatattcaaatcaatgtaaaattagagcttttactgcaccaatccatgttttaccaattcttctaatcctgtcttcagcctctgtgcagctgctctacagtcattttccatgagcccaccaaaggaaatcctcaaatgccccggggacccacatgcactccctgggatcgcaaccaccccatgcctgtgagcaagccagtgaaccaccttcacatcatccatgcatttctctggtagcgtcgcccataagtaaattgcacctttttcacccagcacagcaccttcacccaatggtgaca

SEQ ID NO: 16649 - DNA, 543 bp, Gossypium hirsutum
  Clone ID: LIB3829-022-Q6-N6-A5
actaaaacaccaagtataataataatattaataaatgaatatttacaaaggtaccctcgcaccctttccaatttttttctacacattttaatcaagtcttattcaaaataaacgggactaacagttacattgactcgtccgagacgatgacggcgtcagcatcccaccaagtttcaacctcagaatccgttaggttccttaacggcgaactcgccttcctcatatcacccaccgttaacattcccttcacgtcacccctgatataaactttctcgacgccgtcagtattgaccgctgagattttctccatgggtttttcggggctccattctgttagaatcaccggctgccggcaatcaaggcgcgtgtcccatgcactgacggcgactcgtcgagttgacgaatcaccgccggtggagactacaactgctggcgacgacgacgatgctgaaaccgcctgaaagtcgctcttctccccaaatattgacttgatttttgtttctttgttgatgtcgtaaacatttaaaacgttgtcgctttcat

SEQ ID NO: 16650 - DNA, 512 bp, Gossypium hirsutum
  Clone ID: LIB3829-022-Q6-N6-A6
aaggaaaacgacaaaactatgcataacatggaaaaatataacaatgttctttttaacccagctctgcagaattagatgtttgtgcacctaatctggagaactcatttgattgaatcaacaaaacaaccaccacaagacctgcaatattacaccacaagagacaggcatgttttcattgcttctatgttcaaagattataagaacagcatttcatccacagctttactgcttcccccaaatccacaaacaatactctcccttatcaaagatgttattaaggcacaatctcatttactacctccaggtccaccaaataggtagtccagagaagatccgcctccaggggcagaatgaaccttggtggaaggtcgatcctgcgtaaggaaattgccagtattctgaccatcagcacgcatgtaattgtttgcggaaatactgttaataccagccggaatttgcttggaaatatctactggttcaggagcaggggcaggtttggagacagctggtgc

SEQ ID NO: 16651 - DNA, 543 bp, Gossypium hirsutum
  Clone ID: LIB3829-022-Q6-N6-A7
aaatgagaaaaaaagagcataatataccaaagcataaaccatcatacaaccgttacaatctgtgactacagtaaccacagcttttatgaatacgacagagaaagggaaaatggtcctaaagttctaagaaccaaagctttgttccacttttctctcctcaacttcttcacttgtattccaaaatcatgttgttttcaggagccaagccaatgctggcccttagtatgttctccagcattgcacgctgcttggacagtgcgttcaccaccggtgtgcctggtggaacaagaggggctttggtgaggtaactgaggattgtagccacaggatggaaagagtggaacttgccctctccatcagccttgaactggatcctggtgctaagctcagcaaggagaaccaaatctaggataatgggagcagccaacagggaatcctcacatgtgttgtgcaacacaatggtgttcttgcctcccatgaatatctctgatgtatactcatccaaggctcttttgctgtctcccacatatgggacatacttga

SEQ ID NO: 16652 - DNA, 540 bp, Gossypium hirsutum
  Clone ID: LIB3829-022-Q6-N6-A8
atgaatgtgaacttgtgaatgataattaaacatatattaaaaccagtgacatatatcctgcatacggttgcgccaatttctaaccaaaaccaccaaactaagctaagttgagccacaagtttgaaagcaattttcaaacttgtttattggtttggctggtattatttgtccaatgattattattagtatacaactctgttgatgtaacactaatgtacaagactcattcttagggtattgaaaatattatatcagtgaggcaggtcaacttgcatttcaccaatatgatgatgacaaaatccacgatccctatgcttccgaaagatctactttctcatttattggagcaatcgatggatcttctgcactggatggttgagattcaagcttcgcagcagcctgcaacactcggttttgaacatctaaggatgaaggtgaggtcgaaagtccaatgccattggtctctaacttcccagcaatccatgaatatgccacagctccaactttagcaggacccaacaacaacgtcagatctttctt

SEQ ID NO: 16653 - DNA, 492 bp, Gossypium hirsutum
  Clone ID: LIB3829-022-Q6-N6-A9
acaagtaacacaagctcaatatatcaattgtcatgctccgacaatctttggatacaaaattaggatcctctaaaatatcttgtttggggggaaacttttaaaaagaaaagaaaacaataactagtggttgcatatatcaatatttctcaagcaaaccaaaataataggggacatacagccatagatcctatgactaacatgacgggggggagtatcccaaacctaacctgaatactcttctcaaaaactctcgggaagaagtataaaactgggtcaaatgggctcctctttggctttcttcaactgctacactttgcgtacctgaatattgggtgtggactggaatcgccagatcggctgtctcccgctctgaacaaaagctaccttttttccttccttcaccattccttgcttttgcaacaaagctaaagcagttttaaaggttttttcagcatcatccgaaaactccatatatatgggacatactccttg

SEQ ID NO: 16654 - DNA, 562 bp, Gossypium hirsutum
  Clone ID: LIB3829-022-Q6-N6-B1
gatgaaaacaagcatttcattaacattagggtcattacctctctcatatatatgacaagaattgtgacaatataacttatacaacatatacatttcacatcaacccaaacccactaagagaaaccaactcatcactgcagaaaatgaatcgggctacttttctttcaggacatccatatgggcactactgaaacttcaagaccatttccctgcttggagagtcagttaaaatcctggagattttcatgaatgaacagtgatgttagttgctctgctcggcgattttcgtcggagcggtttttgtcatctcttttacctgttttgcttgatctttcaccttgtgagtcccattgctgttgctgttctgtccactgacctggatcttgcttttgaccatatttgcagtagtggatcgttgcacttcgttacctaagctgtggcggtgagttcgggagcaagcttttgccttttcaacttgagtggcagggactaagtcaccacagctcattctccgggtaagatttggtgactttggccgagtcagtggcagcttcttgagttc

SEQ ID NO: 16655 - DNA, 572 bp, Gossypium hirsutum
  Clone ID: LIB3829-022-Q6-N6-B10
gatccaatgtaattgctgatagttaccgttaagatacaatataagcttgcaaaggttctatgtggaagataccgaaattaccaaaactgttgttttacatatagaaaccttactaagaagactgccaaggaagtcttcataccttcaaagttgtcatctgttgtttgtttagtattcgaggtacagcattatcatcttatgcttgtcaaaaggcagttttaatctccaatccttttgtttacgactaaatggtctacccttgctgttggggtccctgttctccttcacctctgccaacttccatacacagttctcttcctcgaccaaatctagtaagaagactccactcttttcagtataattagacccagcgtcttcaatataacaaactctcatagccatgtctttgaaccgatctaaatcatctggtacttttagtattctctctgcaccaggagatgatacctgaagagccaaatcatctggtatttctcttcgttgtccagcttcatctaatcttttcttatattcttgactatagctctgcagttcctccatgctgggacaaccat

SEQ ID NO: 16656 - DNA, 511 bp, Gossypium hirsutum
  Clone ID: LIB3829-022-Q6-N6-B11
ggctgaagcctttgcaatgcgggcaaataataatgtaaccagatatatagccaacggtctatgactattacgacgttattagaacacaacagattacaaaatccatgcgtaactggttctatgctgggtttcatcaatcaacacaaaccgtgtatatgtgtatcaagtcttttgacggcaaccaaattttaagaataatttcaaggtacaagaacaacctaaaaaaaccaaactagatttctacatgatttgactttaaattccttcaaaggggttctttagatttccaccaagcaaggacatgagaccaccaccatggaccctaccctccggaattatgaagtcaaagctcttcttattgacaacgccaccgatgtccttgcggtccccatttcttcgttcttcttgcttctcagcactcaagaaacttgagtaagaggatgaggatttcatagataaaggaaccaatacctgaggtggtattagttgttgccttttcgctggtttgtcg

SEQ ID NO: 16657 - DNA, 541 bp, Gossypium hirsutum
  Clone ID: LIB3829-022-Q6-N6-B2
gaagataatataaataaacacttttaggggggaagtgttcaggcttaaagcctgtctctctgaaaaaatccacagaatgtctcttcaacaagttccataatggccatggatgccagcttacataggaaccaaacatacaccaaccatatagctcattaatcctcatttccgaagcctgatgtgagggtacagtcccaatatatgctccggcaggaagtcgtgccgggtcagaattccaacaattggaggcctcccctgactctttggtaccacacacatgtgccggagacctagctgacggaagagaactgcagctttggcaagtgacatggtctcaaccactgtgtacggtgatgtattggtgattggatggagatcaacatacatgtccatttcctcgtctttgatatcaagatcctctagtttgactccctttcctgaccctgccttggcgaagtcaaatttggagattctacgtactacctcatctcctgaaagtaccctatcccatgaaaatatctttcctttaagtaaaacaagt

SEQ ID NO: 16658 - DNA, 564 bp, Gossypium hirsutum
  unsure (1)..(564): unsure at all n locations; Clone ID: LIB3829-022-Q6-N6-B7
aaatagaaaagantaaataaattagagttgtacgtacgttcacaatccaccaacaatcacaaccagttacaaattcatttcatctcccaagtcttctttccacaataataagggtgccaaatacaattaaaagttgcaaagtactataaaacaccaaaccaaatacacaaattgaagctcacacatctgctccaaaacactgctatgccaatgacatgctaaggaagcaacagtatcccgcgtctacctgtaagaatctggacgctttggcttgctttgaaaaactgtctcaatcttctccatgacagcaggagtcagcaatgcgattacatcaagtgccttcatgttctcttgaatctgagattcctttgtagcaccagtaataaccgatgatacattaggatttgcagcgcaccatgcgattgcaagttgagctaatggtacaccaagttcatcagcaattggcttcagtccattaactttcctcaacacatcatcaattagtgaacggttagcaagatttttgaaattttccaaagcaaaccgactgtcagatggtatatt

SEQ ID NO: 16659 - DNA, 533 bp, Gossypium hirsutum
  Clone ID: LIB3829-022-Q6-N6-B8
gatatgccataatgtcaatcacccttcttgcaaataaattatttaaacccccttgaacaaaggataatgtatgatttgttacaagacacgaaccggtttgtcatgattcccctttatttcctttcagattaattactgaaagctcttgttcaacaaactctcccgtacatatggatggatatttgctagcaaggggtgattctgcaaagtgtccgagaggctttaacacagcatccgaagctatgtgcgcaaacaacgttgaggatactctccataggctacgattttgctctgatgctaactttatagcattgattgtcctctttgtgacaacaacttcatgcataccagcagtacactcaccagcagtcaaccattctatctgcttcccagtctgaattagaagacatcctattggaactttcacctcaatcttttccccagtccttagccagatgtttagaccagggaacctgcttctgccgtgaatagttagaaagttaaggtcatagtggtagcctgcaaaaacagtg

SEQ ID NO: 16660 - DNA, 526 bp, Gossypium hirsutum
  Clone ID: LIB3829-022-Q6-N6-C1
aattgaaaagaaagcatttacttcattccactttcatgttttaaaactcctgataatacaagaaaaaatatcgatagaaaccagacactaacaagcaaacccattaaaccctaaaataagcgccgaagctcactcaaaccctaaaacgccttaacctaagcccaagaaccgccgccacctgagtaacgagatccaccatcaccgtatccaccaccatcacggcgtccacctccgtatccaccacctccatatccaccttcacggcgaccaccatatccaccgcctccaccacggttgtacccaccttttcctccaaatcctccaccaccacctccgccgccgcttcggcgagattgtgcttcgttgacggttatattccttccatcgagactccgaccgttcattccttcaatagcatctctcatcgatttctcatcacggaaagtaacgaagccaaagcctctggatcttccagtctcacgatcgttaatgatcttcgaatcgacgatctcgccgtaagcactga

SEQ ID NO: 16661 - DNA, 419 bp, Gossypium hirsutum
  Clone ID: LIB3829-022-Q6-N6-C10
ggggaacagaaaaggttgtttaaaaattcaggcaaacattttgggggtaaattaaacagggccagaacctaggggggagggtacccacccgggtaaaattttcatttttggcagaaaggggccttttacaaaaattaaggggggggggcataaaaacatttgagggcctaaaccaataaagcctttgaaaccatggggggattggcaacacttggcggggtttgcctttgcccgcccacggggttttaaacagccagccctgaacctccaaagaaaaaatactgactccttaacccctttttaaggggccttggcttaatgggatcggggttttaaaaaaaaaggctgggattggaacaagaagggccaattatatcaccttcaaggaaaatccctttttggtaaaccattgagccgga

SEQ ID NO: 16662 - DNA, 542 bp, Gossypium hirsutum
  Clone ID: LIB3829-022-Q6-N6-C11
gctaaaacttcgaacatgcataaaaattaatcagtaaataccatagacttctttttccacatttcctcccttccccctttgtctctacttgcacgggcggagttatgcaagaaaaataaaaaggattaaaaaaaatagaacatcattatcggaatgtactgagagttccacgagatcccgagaaagagaactcagcacttagggttttgtttgtggtatctccattattgtcagttctgtaattcaaggactgcataggttcttgagatcttcttccttggcataccagtttggtattatcttggacacatggggataaagatccttgtatgaatttcggatcgtcccttccgcaactcccgtagcaacagaaatatctttaaggggcttcttatcatccgacagctgtgttatgatataaataactgcagctgcaattgatatagggctccgccttatatcaaactcctcagacttctgaactgcttcttgggcagctttaactgcttgattattcatgccaagattggaacaaaaacgcc

SEQ ID NO: 16663 - DNA, 485 bp, Gossypium hirsutum
  Clone ID: LIB3829-022-Q6-N6-C12
ccagggctcaaatcaaggatcatttatccctctccaattatcaattgtggggaatacaatacaaagcgttgccaacatacaattaaatccatcaaaaaaaaaacaggtggtttaataattaaatttcagctaaaccaaaactaaaacttttcttggaacatactacaaaaagcgttgttgaatttaaatacaagtctgggtataacaccacttgttttttcatggacaaaaccaaagctgcgtttttggcatgcctgctgctttcttttttttgggctcctttttctacggggcttacgagcatcaaaattggaacttaaattactactgtttcctgtctttgagtttgaggatccccctgccttaaaggaaaaaccacttctgctatttgatgcattgcttgatgcaaacatttcagcttttcgcatggatgaatttcggctagataaaaatccaaaccttgattttgcatgtactgaatttga

SEQ ID NO: 16664 - DNA, 543 bp, Gossypium hirsutum
  Clone ID: LIB3829-022-Q6-N6-C2
atgaacaagtattctcaaatctcaaccattcaaggcttccaaaataacaataaaaaggtatcaaatggtattaaactttgaagcaatcaaaaccttcctacatgtctccatgttcttaaaattaatgcaaccatttaaaaccaaaataagaatatagaaaatttatcttaaaagctttcacaggccttaagcacgagcaggaactgcaacacctggacgtggtgcttgaccaggctgaccaggctttggcatatcatccctgcgtctgatgaagcgggcgggtggatcacgtttcctcctatcggtgcgggatcggactctcacaacgtgggagtggatcgcacacgagacacagtattgcatcttaacatacagcttaggcaaagtataagtgtcataaacgcaggcttcttggacatctctaacagcagcttgttccacaatgttcctcacaagaaacctcttaattgacttatccttggggcagcatttgccacagttagaacagcggatgaatttgacatggccacggccatgcttgtt

SEQ ID NO: 16665 - DNA, 263 bp, Gossypium hirsutum
  Clone ID: LIB3829-022-Q6-N6-C3
aaagggggggggggggggggagggggggggggggaaggggggggggggggggggggggagggggggggggggggggggggggggggggggggggggaggggggggggggggagggggggaaaggggggggggggggggggggggggggggggggggggggggcgggggggggggggcgacggaaggggggggggggggccggcgcgcggggggggcggggcggggcagcgggggggcggccgggcgcggcggggggggggggc

SEQ ID NO: 16666 - DNA, 558 bp, Gossypium hirsutum
  Clone ID: LIB3829-022-Q6-N6-C4
ggactataaaaagttattgcatcaattcaaattattaatgtgtcaaaatttatataaatatataatttcttgagcacaattatgatacttgacacttgacaatacacgaatacaacatgaatactaggatacgggcggttagttcggctttgttttagagaaaaaaaaaattgctttatcggaggataatgttgtcgaacagggtacatgcttacacaacatatcggtaagtgatataacgaccggcagtttcactaggccggattattttcaccacttgtccacgtttcagcccgaagtatcttgcgattggatcactcacctggatacgaggcagctgtgtttcctttacggtatatctatgaagcaaagtctttttctcctcattagtaagcacctgatgttcaggcacgagagcatgttcttttacattgaccaggagctcggcttcctggaaaacctccaaatggaactttgaagaaatttcatttatacaagttcgagcaaagggagttaaattctgttgcacaactagtatagccctaaatacattctctg

SEQ ID NO: 16667 - DNA, 541 bp, Gossypium hirsutum
  Clone ID: LIB3829-022-Q6-N6-C5
cattaacaaagcaagcttttacaagataatttattctctcagcatataatataaaactccatataaagaactcttttctcttttttttttttttgagagagagagagttctatataggcactcttgataaccgggaaaggtagcttaagtaggcacataatataacacatagtaggacaaaacattagagttttgatccttggatgggcaaatatacagcagcaacatttccttaagcatccaaatgaatcatgcatctcagacctataccctggagcatgtagtcgaatgccttgttaatatcggcaaaaggcacagagtgtgtgatgaacttgtccatatccagccccagctcctgcaacaatatcaacaaaaccatcatcgaaatgaactatattctgtaatctgtatagaggacatcaccttaccttgttcaaatatttgtcgacaaccatgggaatatcagtgcgtggtttatagttgccataaaaagcacccttaagggtcctctcacttagtagattcattggatgagttttga

SEQ ID NO: 16668 - DNA, 537 bp, Gossypium hirsutum
  Clone ID: LIB3829-022-Q6-N6-C6
agtaataggaatttatttcattaacaaagcaagcttttacaagataatttattctctcatcacataatataaaactccatataaagaactctcttttttttttttagagagagagagttctatatgggcactcttgataaccgggaaaggtagcttaagtaggcacataaatataacacatagtaggacaaaacattagagttttgatccttggttgggcaaatatacagcagcaacactctcttaagcatccaaatgaatcatgcatctcagacctataccctggagcatgtagtcgaatgccttgtttatatcggcaaaaggcacagagtgtgtgatgaacttgtccatatccagccccagctccttgttcaaatatttgtcgacaaccataggaatatcagtgcgtggtttatagttgccataaaaagcacccttaagggtcctctcacttagtagattcattggatgagttttgaatgcatcgtctttctttggcacacccaccagcacacaaacaccccaaccatcatggac

SEQ ID NO: 16669 - DNA, 555 bp, Gossypium hirsutum
  Clone ID: LIB3829-022-Q6-N6-C7
cacgttctcaagctcggcatagccattgatacacattcactcttcacatgcacgtcactatgacttaattcatggtctttacataatgtttgtggacaatacatgagatttcataactatttgaaccttttattccctcaaaatttcgtgaattgtaagcaagggaagatcatgtcttcaccaaacttatccaaatggtatgaaaaatagttgtatatctttgtaatttacgaaccggaaaggaaaggaacttgagctaaagtcgagggtaaggaaatgtgaaggttattaaccgctaaataagcagcaataccggcagcgtaaccggcaaaagcaaaaccactcacctttcggaaataccaaaagaagtcgattttttccattcccatgtatgcaactccggctgcagacccgataactagcatggatccaccagtaccggcacaatatgcaacaagttgccagaactcggagtcctggggaaatgaagtgagatcatacattcccattgttgctgcgacaagtgggacattgtctataattgctgacacaact

SEQ ID NO: 16670 - DNA, 541 bp, Gossypium hirsutum
  Clone ID: LIB3829-022-Q6-N6-C8
aacatccaaaacaaaacccgtgatcatcatttttgtaattagtaaatcataatgagcttctaatctaattaatacagataggtagttactatctccaaactataacagatactaaaatatagcatgcaactctagcatagtgaaaacaatgtcctcaaaagggaaaattttcccaaaagataaagctgaataccaatttaagttcttaacaaggctacaataagaaagttaaaaccgaccggcattgcatctgctgctcctcccaagcaactgatttaaaagcattccatatctgagaacaacacgtggcctccagcaaaccacacaatcaattcctgatttcgactagaaaactaggcttctgcagaacgaacttcctttatgacggcatgtatgtagatgtatcaatctgctcaggaagctcctttatatccacctcaaacctctcttggacctggttgagcacatcagaatctgaagcagaagaaacaaacgtaattgcaagacccttggtgccaaacctaccagctctgccaaccct

SEQ ID NO: 16671 - DNA, 525 bp, Gossypium hirsutum
  Clone ID: LIB3829-022-Q6-N6-C9
gttctaaaagtagctgcattgattgaacaaaatgctttacatatgaaacttaagacctccaagcaaatacgtgccaaagcacatagaactgataaattcataccaatgggtgctatgcagcacataaacacactagactattcttcttcaatcaccagtgccattgagtttttttttttttttttatgcactagccatctttatgttgagcttttcttcactttggtagcagcagcaacaaacaaaatggtaatgcaatcacaatagcctcctttacgacctttttaattgttcggagttcacaatggagctaccattgcattctcagtaagtagattcatgtgatgggctatccgcatgcatgtccattgaggaatcattggagctgaaagggttagagtcccgagtcgggggctggagaaagttggattcattgttcctgtctccattttctgaaggcaaaccattcgtactgtagccttcttgagcaatgtgataatactgaagactctgaagaatggggct

SEQ ID NO: 16672 - DNA, 558 bp, Gossypium hirsutum
  Clone ID: LIB3829-022-Q6-N6-D1
gaaatgaaagtgccatattttttttcctgaacacaaagttccaacagatgtaaacaataccagtagtagatctacaccaataattaaaccctgaaattaacccccccccccaaaaaaaagattgaaaatgtaaagcttttcacctaccactccctctattgatcatctccttgtacctaatgatggaatcaagcttttgcagtttcagctggtgcttgaacttgttgatgaaatcatcagctttggcatccacctcatcgtcttcttcctccgtagctttctctttcccttctctcacggtggccggccgtcgattttccacgatatctccttcctcgaaatgttgaaaagcagactttacacttgcagatttcttcatcttcctcggaagcttagttggtacctcaccagatgctggtttagtatcagatttggtcctcgcaacatgatttccctccttcagttgactgtatacttcatcaagcgtttttccttcaccttgggttccctccctttcatcttgtttttcaggctcttgcaccttttcatcatgtccct

SEQ ID NO: 16673 - DNA, 561 bp, Gossypium hirsutum
  Clone ID: LIB3829-022-Q6-N6-D10
aacaaaaacatgcatgtcttattatatagtcatcttaatttgctttactggaaagggcaaagaagcactaaacaaggataatctattttatttaagcgcggtcctggttctcctcctattccaggacaactggaatgctctgctcatgcctgaaaaaattgccgggatcaactttgctttttatttttaccaatcttcggaaattgcccttgaaatacatggcgccccaaacactagcctcggtgtagctagcgttgttgtggttcattcccaaatcaaggtctctgtaattgacgtatgcccccctgggagatgtgggaacataagcactcatgtaatcatacagccccttaatccaatccatgtgctttcgggtggcgtccttgcttccctcgtaccatgaggtcacgtactggattttgaataagttaccttttctgtgagggaaaggaattgcagaatccgaaatgtttgccatcattcctccgtaagggttccatatcatcaacggagactcttcttccaacaaaatttcccacagcttctcaagagcggtttcaa

SEQ ID NO: 16674 - DNA, 327 bp, Gossypium hirsutum
  Clone ID: LIB3829-022-Q6-N6-D11
aataataaaaacttagttcattcttataatccattttcactgctaaataaagaagcgtggagatgttcgaatggtatcaatagcataattttatatgccgagacacgttcgtaagtgaaaaataaaatagtatattacagtgatagattttgaacacgcagtgggtctatgtggcaattgcagcatttccacacaaattaaatgttttctatttcactttaatgtatcgatgaaatttagtagcatcaatgcttcttccatgtcagagacgaaagttgcagaaaattttttcattttaacttcattgaagcaaatgaagttgccaag

SEQ ID NO: 16675 - DNA, 468 bp, Gossypium hirsutum
  Clone ID: LIB3829-022-Q6-N6-D2
aagcgaaaatttaaaactttttttaaagaaaaatatgatcaacaatgggagccaaaatatgaaagggagaaatgaaaattctgaaaaggggacaaaatgagaatgactaactgttttctacttatctatcaggacaaccttatgaacagactaaaccagggggggtattacccaaaattcactaaagaaatccgagccaagttgaaaaaaaaagattgaccttttgaaaacaacttacaagaaactgtcaagctgggattccaattcttctattgaaaccaagttgattgcacctttctctaccggagaaaacactggttttaaaagagaaagaaaccggatatgggcttccacaataattgggttgagaggtttgaaaagaattgggcttgatggtgggtacggaaaaaaaagttccacctgtgctatcacacccgggaagtggctgctaaaaaaaagaaaggaccc

SEQ ID NO: 16676 - DNA, 524 bp, Gossypium hirsutum
  Clone ID: LIB3829-022-Q6-N6-D6
acaatgaaaggtgctctatttatatttcagaacaacagtgtttctatatccagcttattaacttacaatggtaaaatactggttcaatgcgagctagaaatgaacagtctaaatggtcgaatgatcgtatcctgttacatttcagaggataggtcatcctagaaatcgcaattcataaaccatgactgaattctgcagagcacttatctgacttgcaatggatcgaaacctaaattataactatcctactggtcctgcatataagtctctcatcattactctgttatgccttcctaaaaaaatatcgagccccttcagcaacaaattctacatcgttcatagtatatgtgtagaacggcacatgccatgaaacatgggccacccattttccgacaaaaccattaggattcaatgaatcagaaaaaccactagctgctttcatgagtgagattgacaacacaaaaaagcttgttaaggacgggttccctgtttatagggttccaccatcattaaattcttgccgc

SEQ ID NO: 16677 - DNA, 456 bp, Gossypium hirsutum
  Clone ID: LIB3829-022-Q6-N6-D7
agttaaaataatttcatttcactatatacacacacacatacacaaaccaagcaaccatggatacaagaagcaaaacacctaatgaaccatagctgctttattctaatagtaaaaacccaaatacatcatatattatttagatcagcttccataatatgcttagcttttttttctcatttacaattgcaagggttgcaagtgcagttatctccacatttgcagccattttcagccccagtttccatttcagctccatcaaagtgcactttccggggtgccacgccaagaacaagtgtcccggttgtggtttgctcagcaaagttcatctcagggtacatcttgcaaccgccgcagccgctgccgcacttgcaaccggagccgcaaccgcagtttccaccacagcaagacatttttcttcacctcactgatcactaaagggcgattcttaatacaaat

SEQ ID NO: 16678 - DNA, 531 bp, Gossypium hirsutum
  Clone ID: LIB3829-022-Q6-N6-D8
cttctggatcatattgtctatatccaacggtattagtttcattattattaacagcattcacctgcctcaagtttgaagcagaaaaacggatcctccatcttttttggcccaattcctcgtcttttcctgtttttcttctggatcatattgtctatgtccaatggtattagtttcgttattattaacagcattcacctgcctcgagtttgaagcagacgaatcggatcctcctccatctttcttggcccaattcctcgacttttccagtttttcttctctaattgcttttctacgaggtggtgacacctttggcactttctcttctgtatcagctgaattttgagaatttgatgaataaactctttggctcgaagaaccaccataattactattcacttcaaatctctccctatccgttgggccagaagcctttccactttcctccctcccattgaatgggtaacctgacgaaaaagtagagggctgtttgtcaatgtctgtagtataaacatctttctctgctacccttcg

SEQ ID NO: 16679 - DNA, 294 bp, Gossypium hirsutum
  Clone ID: LIB3829-022-Q6-N6-D9
caattggggggcagctggcgctcctgaagaggataatgacatccactgcgcacagcagtgatattagacttaagaatgcctcggaggtacgcaagtgagcctgtagcacacactatgctttggccctcccacgggtaaggtcctaggacgccaaccattttttgcgaatcaaagggctgcggtgaaaatatgtctaaatccatattgcctgcgcagaaatggagatgtttaaaggtcaccaggatcatattacttgccaggatgctgaacgtcttaggggacaaagaccatgcc

SEQ ID NO: 16680 - DNA, 451 bp, Gossypium hirsutum
  Clone ID: LIB3829-022-Q6-N6-E1
accaattacttagtagcattgacactcatagattcaaacattttattacatcaccatccctcacattttattacataactcacactcttcaaacacctcactgtttccagtttgttcatgcattcaccttaggtgcccacccggcgatcacgtattccttagcagcccgcgttttcacgaacgattcacgactgaatatcgacttcatgtaattgcggacattagtcaagctttccggaacagtccatttcttgaaatggccaagagcaacctcaagatggtaaagttttggtcccaaagctaaatcaactgcacttatcttttccccagcaatgaatgggccatgtgccttaagatgttcatccaatgccttgagttcattaagcaaagcctgctcaaatccatcaatagcgtctttgctcttcaaaaatgtgacaaaagttccaaatat

SEQ ID NO: 16681 - DNA, 513 bp, Gossypium hirsutum
  Clone ID: LIB3829-022-Q6-N6-E10
ggtagaatagtttgcaaagtaacttattattgccataaatttaatataagttgatacatgaactgaataggcgttaagcttcccgcccacaccatcaaaggcttctagtctttaacaataaacacacaaattcataggattctaaaaaaggaaaaaagaagaagataaaactgcaagccaagtggagcacgaccaattacttaaaaggcatgtttgtttaactttaagcagcaacactatggagcacaacagtctcaacagtgaggccaggtccaaacccaaagagcactccccactccaatccttctcctgtggtctgaagcccatcttcccttgatttctttctcatctcatccaaaataaatagaacacaagcacttgacatgttaccatactctgaaagaacgtgccttgtggctcgtagcttctctggcttcaatgctaatttggcttctacttgatctaatattgctggaccaccccgatgagcaatccaaaaaagggaggtccaat

SEQ ID NO: 16682 - DNA, 541 bp, Gossypium hirsutum
  Clone ID: LIB3829-022-Q6-N6-E11
gactcaagcttgttatttcatataattatcagtcccaaagtttggcactaaacattttgttaaagcctaaaacaatatactaagttgacaactaggtgattacctacatacaatcaagttgatgtatgcattttatgtagagtacaaagcaaacaaacaaaattcttttaagaacaaaacctataagcaaaataaaatatttaagaaacattcctaaaaccacatttagtaggcctgaaagaatacgttgcaagataagtatgggaactactggtcactttcacccgcagggagtaagctttttattgcctgcacctcgaggattgtcatctttccagtcatcccatgctcgtgccttctcttgggcagcatcatcgtcttcatcatcttcacttggtcccatctttggtttgtccttgtaccatgctgagttagcttcttcaaacatttttgcattcctctcctgccacttattcatcatttccatctccctcagaccagcttcctcgatgcttatagttggcatccgataagcaggttg

SEQ ID NO: 16683 - DNA, 522 bp, Gossypium hirsutum
  Clone ID: LIB3829-022-Q6-N6-E12
gcaaaagtgggcagaattagatttaataataatttgcgtcataatcttatcgtaattcaataattataataataatgtaacctaacaatattatttaggaacaagctcggattgaaacgaagccagtcctctttttttttcaatcaccttggcgagttaaaaaaacacaaatatgcttctttttttcaacaaattcgacattaaacagacttgcctaccaaaaagcatccaacaaacaaagcttgatcaaactgattgaacaccattaaccgcaattctttttaacccctaatgaacaatgggttggtgtgtactggttcataccatatatcaaaatcacaatgagagcagcaacaataaccatctcaacttctcttgacaactgttacatcaatacatctgtaatgcaataatagataaagcaacaatccctccactcttccgtgctgcaacacaacaggataagttacacagcaatttgcttacctctaagaacaaaattttttaagcactactgcgtga

SEQ ID NO: 16684 - DNA, 531 bp, Gossypium hirsutum
  Clone ID: LIB3829-022-Q6-N6-E2
agcaaaaagaccacttgtaatcaatcagtcatagttaaatatggttgttccgaaaatcactaatacactgaagttctatccatgttagttggtagcacactaccaccagcaatgacatatacatcttcaagcaaccacgtgcatcataggtgctgcatcagcaagagtcccatcttgttctcatatacatttcacccacgttcaagccttgaattacaaaaatcacagaccataaatcatgtgtcaaacttccaccacttgaacatcttcaacatcaataatctcaacttcttgaacatctttgaaataagaagctggaatctccagtgaagctggaattgttgccacatatttgaacttatgttggttgtatttttctctaactgcatgaagtgaatctcctcttctactcaaatacaattcatgtaagataaggacacactcttttagatcagatgctttgtaacccaagtttcgttgcaaggcagagctccaaggatgacacttcggtttaattataaacattgtaag

SEQ ID NO: 16685 - DNA, 95 bp, Gossypium hirsutum
  unsure (1)..(95): unsure at all n locations; Clone ID: LIB3829-022-Q6-N6-E3
ggaagggagcctaccttacaatagnaagcatctaagcaggtatacaaaaaaaaaagaggcttacagagctcccagaaaaaataaaattacatttt

SEQ ID NO: 16686 - DNA, 535 bp, Gossypium hirsutum
  Clone ID: LIB3829-022-Q6-N6-E4
aatagagaaaattattaacttgatatttagattaattaattatacaagagcttcaacttggaagttggaactgtatttctatcaacactattatatacagaagaaggtgctcaattccacatcctagccattttatactgtaaaacttcatttaccaatggctcatctttaatcaatgtatgcattatagatccaatgtttcatttcaattccatctcttggcattcttctgccctttcgacttctgtttcgcagcttgaaacgcctgccgtttttgtttcttctgagcttctttctcagcctttgacatcttggatttggttttcacttttggagctttctcatcaagctccgcctcacgctcgagctccttttcccttgcctcaagggtcttctccagaaaataattgtaatcgcctacatagtcctgcaaatgcccggcttttacttccactactctggtcacaatttgctttataaagaatcgggcatgagaaacagtaatgactgtgccactgtactctctaattgcctc

SEQ ID NO: 16687 - DNA, 478 bp, Gossypium hirsutum
  Clone ID: LIB3829-022-Q6-N6-E5
atgagaaactaatacataatcttaaccaagttttatcaagggacagcaaaattttgggttggactttcccatacaatatctggaaatgcaatacatgatttgaacagaaacattttgatgccaacttcaagctgtagtttggccaactccattgttaaactggtagcgttgcgaccacataaaataatttgccacaaacacgggatccctccaagtctgttacgtgtgaaatggaagcaactaaagccagtaaccgatcacatattactaaaacggggctaatttggaattataaaaccttcctaccacgttcctcaaatcagcaataaaggattaagtttgaaccctaaaaccaaaagatgtcccaggggccactttttcaacctcgaagcttaagggtatctaaaaacgggtttctagctatttggcggaatatttcaagatcagtttctttgatcggtttatgaataaaaacttt

SEQ ID NO: 16688 - DNA, 89 bp, Gossypium hirsutum
  Clone ID: LIB3829-022-Q6-N6-E6
gagaaaagaagtgaaaacatcttttttttgattaattaattgaaaccattgcagcaaaactggactgcaccaatggcgaaattcatctc

SEQ ID NO: 16689 - DNA, 461 bp, Gossypium hirsutum
  Clone ID: LIB3829-022-Q6-N6-E7
gaaacatgactcctggcattaattaaatatattatcgtatcatgttttgaatagcataaaagcatacatgggaacataatacaaattcatataattatacatcaaaagatgaccggattcttagatgatactggttagaaaacattaccaactgagggcattcttggactgctgcagctttgcattgtaagaattttctatctcctccttgcaagattttagcagaggctgtaaaaatgatgttctgaaaaacgtgaccgactctccaagagaggttctatcccattcattctcagcatcttgtcttggtcctcccctgttcagttcttccagaagctgggatagggtcggcactgtggttggatcaaactcatcacaattgtttgggtcaattggaacacaaacacgacctgtttttggatgtacacaaaaaggtgccttcagtaaatggttcatgtgct

SEQ ID NO: 16690 - DNA, 537 bp, Gossypium hirsutum
  Clone ID: LIB3829-022-Q6-N6-E8
aacaaacacgtaaatttattaataatttagttacatcgactgtagtttttagtatattttgcatagaaaaacactcattaaattaattaatacacacgcttacgttacataatacgtacactttctacatgttattacacataaatgaaatcggtgtaataaccaaagacaaccttcaatacttctattatttataataataacccaaaataaaacattctattacaatttaatcccccatgcacaattattaatttcattaagcaaatattattagcaagtcttgagtgggttaccgcaaagacaatcattactatcaaatgatgaagcttcaaggtgatcgaacggcgttcccaccggaatcgtaccgcaaagatggttatggctgagatctaaatgtccgacgaacttcgccgatgatagagatccggggaccgcacctttcaagttattgaacgataaatcaagtgccatgaagtacgatttcggcccgaaaacgtccggtatgttgccttcaagggagtttcgactcaagtt

SEQ ID NO: 16691 - DNA, 563 bp, Gossypium hirsutum
  Clone ID: LIB3829-022-Q6-N6-F1
gtcgaaagatagcagatatcaaataagcaaacaatgtttacatgatacatcatcataggtgatataaacataggtatctgcaataaaacgtagtccatgaatgcttttacttggtctttaagaggtcatggaacgaagcaggcttcctcctggattcagcacaaagttcctcaattgcagaagccaaacgtaggattgtagcttcaccccatggacggcctattagttgtaaacctattggaagtccttgtttgtcataaccaacagggacagtaatggcaggaagaccaagaagattagcagcaagaatgaaccgcatgagataacctgaaacctgcatgttcgattctccattttccagagcaccaggtggtatttttggtgctgtcatgccagttgtcggggtcactatgacatcaaccttcttgaagatctccatgtgatggtgcattatccttcgcctaagacactgggcagcaacatagtctgatgcagtgaatgttcgaaaaatgccatacaagtgcgagtatcacaattcaatttcacacctttcccatcttcta

SEQ ID NO: 16692 - DNA, 420 bp, Gossypium hirsutum
  Clone ID: LIB3829-022-Q6-N6-F10
aaaaacggggatacccataaaaaaaaggttttaaaaagcttttaggggggaaggccaaaagtttagtaaaaacctttaggggaaaggggggttttgcaaaaaacccccttttaagaaaaacctaaaaaaaaaaaccgggggttttcacaaaaccgggaaacccctgggcctttttttaggggacttttttccttttccaaagggagggggggttttttgtttaaaaccaaagggggggggaccccaaggggggaattaagggttattttttgggggaaaaaactagaaaatttgtaagggccaccggcaccggggggtccccccggaaattcggggcggggcccggggggggaaccaattttccctaaaggggggcgattaaaaggtgggggaaaaaaggggaaaaggggttcccggggg

SEQ ID NO: 16693 - DNA, 540 bp, Gossypium hirsutum
  Clone ID: LIB3829-022-Q6-N6-F2
gttaaatgctcttttattggttcctaaactacattatcacattcttgatttccttatataaaccaaaatacgatatacctacaacatcaactactaacctaatactatactgcaaatttcccaacaaaacaaatactattaagagaattctcaactaaaatttccagggttcaatagctccactcctggggaagatttaggcctctttctgctctataatttctccttgtttggttcaatagtatatttcttctggcaaccaaagcatcatagtttggggcaaagctagctttgagatgtggctgaacatgactgctggaatcagcaaaattcagatttaaagcttgaacaaccttcgctgggactagcactgttgagcaacctgatttcttctgagggcgcaggggtgttgtttggatatgtacgaggtaagaaaacaccagttccagcactctctcttttaacactttgagatccaccaagaaacatagctctggtgcaagtaccagaggaccttcccccaacagcattattccttgc

SEQ ID NO: 16694 - DNA, 549 bp, Gossypium hirsutum
  Clone ID: LIB3829-022-Q6-N6-F7
agcaaaaaaaaatcaaaccttaattgagcaaatattgtttaacataacagtcttcatgacagcgaccaaagaccaactactcactcattacaagtagaaaaataaattatctaggaagaaacggtaataaacccgagctgccgattgcggaattattagattacgagatggaacatcgaagacgaggtttgattgcctttcgtcctatgatttttaaggacgggggtacaaacctctctctctcgggcttttcttgctttctctaaagtaagtcattcaatgcttcgtaactctagcgagaacttcaaagtaatcagggaaggttttccgggtacaaccaggatccttgatggtaactggaacctcagcacatgcggctagagagaatgccatggccattcggtgatcatcgtaagtatcgattgctgtcacgtttaatttctctggtggtgtgatcacgcaaaaatccggcccttcttcgactgttgctccaagcttccggagttctgtgcatatagcaatcatcctttcgggctccttcactctcca

SEQ ID NO: 16695 - DNA, 504 bp, Gossypium hirsutum
  Clone ID: LIB3829-022-Q6-N6-F8
ggaggaagttaattggggaattcagataaatgaaaaggccagccattttcttcttttttgaaagctggtacaacaatttagaagtgaaaccaagtgattttaaacttggtcctctttgtcacaacatgggtgatgtaataggttcaaaacacaacaacaaaaagcttgagattgcaatgaaaagaggtaaaaatggagttgataacaatatgtcgcttcccgacatgtcatcaaaatagtcgtcgtcttcgtcatcacccaagtcaaaaccgcttccaccgccgttggctccgctgctccacttccccaaattgttgtccctgccaccaactccaaaaacaccggagtgcatggtgagttggtcaatgaggacagctgatttaggctcaacactataagctttttcatacttaaactcaacaccttcaccggaggcaacaaagtaagctccattcaccattacatcaccttctgatctccaattccaccctttccaatctcctt

SEQ ID NO: 16696 - DNA, 535 bp, Gossypium hirsutum
  Clone ID: LIB3829-022-Q6-N6-G1
gttaaaaagtaattgcatgtattaaatatcaatgtacggaaatttatacatgcatctatgcaagtgctttttccaatatacagagcagaaaccgcagctccaattctgagcaacttaaaatgttcaattattcaaaggaagccgggggcacaaattctgtatattcaaatcaatgtaaaattagagcttttactgcaccaatccatgttttaccaattcttctaatcctgtcttcagcctctgtgcagctgctctacagtcattttccatgagcccaccaaaggaaatcctcaaatgccccggggacccacatgcactccctgggatcgcaaccaccccatgcctgtgagcaagccagtgaaccaccttcacatcatccatgcatttctctggtagcgtcgcccataagtaaattgcaccttttccacccagcacagcaccttcacccaatggtgacagtgcttctataactatttctcgattcttcacgagatctttgacttgttgcgaacccattcaggtcccaattctaacg

SEQ ID NO: 16697 - DNA, 564 bp, Gossypium hirsutum
  unsure (1)..(564): unsure at all n locations; Clone ID: LIB3829-022-Q6-N6-G10
aatcatgaattctcaattgtcattcagcaaacaaaatccaaaagaacaaaagaaaagtcattaagcgagtagttcctctctattcccactctctgtcccactaataaaatgtgaggtcagtaaaatcacaggattacattggtgtagtaatatgtacaacgccaaatgcctaacttctacaaccccatgcatgttccttgttattcattagaatattagatggatgctacaagaatatttcatcttctaataacaggacccttgtacagccctctccgaatcacaaagtcatcagggggctgaaactcttctaaccatgtcacttccgagaacgtttctccattcatttcaatctcaccaggtaaatcccttcttggggacctccggaagtaagtgcagtgtcgtccatgttctgaggagtaaggtggtgataaaatatcaaaaatagcacaggngagtccgtgccctgaaacaatggatgttgcctccacttgtgggataaagtactgttgttgcacaaggggctgtcatctcagtatccttgacaagttttgcagctcttgc

SEQ ID NO: 16698 - DNA, 549 bp, Gossypium hirsutum
  Clone ID: LIB3829-022-Q6-N6-G11
aatagaaatttatttcattaacaaagcaagcttttacaagataatttattctctcagcatataatataaaactccatataaagaactcttttctcttttttttttttttgagagagagagagttctatataggcactcttgataaccgggaaaggtagcttaagtaggcacataatataacacatagtaggacaaaacattagagttttgatccttggatgggcaaatatacagcagcaacatttccttaagcatccaaatgaatcatgcatctcagacctataccctggagcatgtagtcgaatgccttgttaatatcggcaaaaggcacagagtgtgtgatgaacttgtccatatccagccccagctccttgttcaaatatttgtcgacaaccatgggaatatcagtgcgtggtttatagttgccataaaaagcacccttaagggtcctctcacttagtagattcattggatgagttttgaatgcatcgtctttctttggcacacccaccagcacacaaacaccccaaccatcatggacgcattcaa

SEQ ID NO: 16699 - DNA, 528 bp, Gossypium hirsutum
  Clone ID: LIB3829-022-Q6-N6-G12
caagtctaaagaacaattatatttggttctcctcaaaatccgggaaaattattcagagttcagagaaatatcaactggctgcagttgcaattattccagttacaaaaacaacactaacaatgccctcaaagtccaaggcaggaaaagcaaaattctgtaacaaaccttcggcattatctaataaaattttaaaacttatgagaacccaaaggaacactaccaattcttaaccgataagcagtttgctctcatccaagaaggtgtaagtgggtacttccaggttgtatggtgccggacccttgcgaatcctgccagagacatcataatgggaaccatggcaagggcaaaaccatccgccataatcaccagcatttggcaagggaatgcaacccagatgtgtgcaaaccccaacaacaattaaccactctggattcttaacccttgctgcatcctcctgtggatcacgaagagaccctagatcaacactgttcgctaacttgatatcctcgtcagttcggcgcctgatga

SEQ ID NO: 16700 - DNA, 535 bp, Gossypium hirsutum
  Clone ID: LIB3829-022-Q6-N6-G2
aacataaaatgttaaagtaaatcaactgctagttgcaaacagaagaaatgagagcaatgtacaaaaacaaagcaaacaagacaatgcacaatgtcggcaatttaaggtatatgttcagcataacaataactagtttacttttaacttctgttgttttcaagtcaccagattttgtttattcaaccttagacacacaacagaaaaaaggtttgataagttcaaagtttaacataccaaacatgaaacgaagtagataggaaatataagttgcagtacttaataacacgcgcttaattgtcacacacttttatttcttaacatttggagcagctgcaccgagaagcttatcatagtcattcagatgtcagctttgctttcctccctctctcttcctactatttcacggagcatttcagtgagagtggcagcggtattcaactcgccggcttcccttgctttcagtatgcggaacataagagcaagtttaacctgagttctcgcactttgctggattatgagcctagtttccctcttc

SEQ ID NO: 16701 - DNA, 500 bp, Gossypium hirsutum
  unsure (1)..(500): unsure at all n locations; Clone ID: LIB3829-022-Q6-N6-G3
gcttcatattgctactagactgttgacttgcctgaaaacagagaaaattgggaacaacttgaatcaattacaatagaaccaagaagcttaattgagaacttaaaggtttttctacatataaagtccttctggaaccccttctttcttcttaaacatcaccttttccttggccttcttaaagtctgcatgtgtcaccttcatgcgtcgctctcttaaagcaagcaaaccagcctcagtacatattgcctttatatcagctccagagaactcatcttttgtcatcacaaattcttccaagttcacatcatcagccaatgtcatccttgatgtgtgtatctngaaaaatgcgcctccttgttttgatgtcaggaagggggaactcaattttcctatcaatacggccaggacgaagcaaagctggatcaagactttcaattcggtttgttgcaagaatcactttgacgtctcctctcgaatcaaagccatccaattggttcagc

SEQ ID NO: 16702 - DNA, 551 bp, Gossypium hirsutum
  Clone ID: LIB3829-022-Q6-N6-G4
gaggcgaatgaaatttcaagttcttattacattgttacgtttttacatctaaaaacctcacctatcgcacccatcacataatactagccaaaccgaggtgcacaaaaaaacaaaaaaaaaaaaaggaaggaacagagacaacaccagacaatttaatatgcagaagaaaagccatggaacttaatccacttcttcaatcttgggccctgcaccagacccaccagacccaccaccgttaggcatttcagcaccaccacccattggcacatgacctccagcaccaccttgatacatctttgcaatgatgggattgcaaataccttccaattccttcaacttgtcctcaaattcatcaacttcagccagctggttcccatcaagccattcaattgtatcatcaatggctttctaaatcttctgcttctctgcagggtcgagtttcccagcaaacttggcatctttcacggtgttcctcatattgtaagcataattctcaagcccattcttagcttccaccttcttcttcacttcctcatcctctgctttatacc

SEQ ID NO: 16703 - DNA, 502 bp, Gossypium hirsutum
  Clone ID: LIB3829-022-Q6-N6-G5
gatatatcgtcaactagaaacaaagcattagaatggtagcagagttataaaacttgaaaatctacaacggttacagttacaaacgaccagagaatttcagctaaaacctggatggctaatacacacattcaacgaggttgatggatgcaacgacgaccacttttagcattcacattcttcgccggcttctccacgtattttgctggttctgctgaaaaccgaggactagatggcaccaaactcagattcttcatcagagcttcaacacccttctcaaagcctaatgtaatttgataaaacgataaatgcaagtagtagaagtagaatcgacacacacacataattctccatttccagagtcgtaagaatttatttactcgtacgtaccaccatttgacggtaaaggaggtgctatggtttccatttcattagattggatgaactcttcgaactggagatcttcgtcagagacaaagtcaaagggatctgcgagcaaatcaac

SEQ ID NO: 16704 - DNA, 444 bp, Gossypium hirsutum
  Clone ID: LIB3829-022-Q6-N6-G6
gaaagaaagaacacaagtctgcaatatatccagaaatgcaacagttgttacagcaaaagtaaatggctaattctttcacatccaaaacaggaaaaaaaaaaagcccagcaactgggagttgagattttgaattgccaaaatggcaatatctttccttctccttagtcctcatattcgcgttcctcttcttcttcttcgtactcttcatcatcagctgttgcatcttggtactgctgatactcggagaccagatcattcatgttgctctcagcttcagtgaactccatctcatccatgccttcccctgtgtaccaatgcaagaaggccttcctcctaaacatagctgtgaactgctcactcacacgcctgaacatctactgtatggatgttgaattgccaataaatgttgatgccatcttcagcccattgggtgggatgtcacaa

SEQ ID NO: 16705 - DNA, 544 bp, Gossypium hirsutum
  Clone ID: LIB3829-022-Q6-N6-G7
gagatgatccaaaagtatacatttatgttttagaatatccaacaatcagattccaaactcttttttttttatgggataagagctcaagtatacaaatgcagaagtcaatatagaagataaagagagaaactgatcacagatttttctcaacctggattatttgcgagcttcagttttcttctgttctctcgcgggcttctcttcctctctcttcttagcagcttctgccctttgttgtcgtatcagggctaagcgctctaaatcttttcttgcttgttcagttttcccttgttcctgcagcttcatatatcgttcatgtgctttttgcttttctatttcctctctttcacgccttgatagttcagttgttcttcccatatcaacatctttagctttgacattcttttgtttggccaaatttggattctcaatctcaataagcccttgagtaccctttcgtttctcgggttcttcttctacttcctcttcagactcttcttcttcctcctccacttcagcttcttccttcttaaaagtacggggg

SEQ ID NO: 16706 - DNA, 521 bp, Gossypium hirsutum
  unsure (1)..(521): unsure at all n locations; Clone ID: LIB3829-022-Q6-N6-G9
attataacatatttgctttaagttggactgataataatttgcctttgatataacaatatttaatctttccttgtaatctacgctgtaaacttaagaaacaacttggtcaaggcaaggacggtgataaataagtctttggagattgtggaaataagtttgattctgataatacttactattactctcaagttgagtgccatggcagaggccgttgggagtttagtattcaagggaaccaacagatgagagtttaccagtgccggtgtcagtgccggtgctattcatcctttgacctggggttgtggggctaaaaggctctgcccgttgctcgcccatcttctgcacatcctcaggtgaaagtatctttatgtaccaaacattattcacaaatgcctcccnatgggtcgtctccaaggagaagaatatcattctccctgtcgacaaatacaagctgccagcctgatcttaaagggtcttccaacttcccctcaattccaaacatctgagccagctcctctcgc

SEQ ID NO: 16707 - DNA, 572 bp, Gossypium hirsutum
  Clone ID: LIB3829-022-Q6-N6-H1
tcgcgatctagaacattcactcccgctctcgcgcacgtaggatgaaggaggccaagagaaagggaagacactctggatatggtaagaggaagggtaccagggaggcaaggttgccaacaaagattctttggatgaggagaatgcgggtactgaggcgattgcttcgtaagtacagggaatccaagaagattgacaagcacatttaccatgacatgtatatgaaggtcaagggtaatgtgtttaagaacaagcgtgtcttgatggagagtatccacaagtctaaggctgagaaggcgagagagaagaccattgctgatcagtttgaggccaagcgtgctaagaacaaggccagcagggagagaaagttggccagaagagaggaacgccttgcacagggacctggtgtgaaggcaacacccacagcggcaccccaacaagccgagggagttaagaagacgaagaagtgaataaataaggaagatggctcgacttaatatgttaatggcttttgttttctttataggagtttgtttgcaaaacgctggttccatttatgttgactcacataacta

SEQ ID NO: 16708 - DNA, 584 bp, Gossypium hirsutum
  Clone ID: LIB3829-022-Q6-N6-H10
tcgcgatctgttctcttgggttggcatatctaccttattttgcaaaataagaccacaattgagtatcacgaaggggtgagagctatgtggctcgcggagaaaggagggactgtctataagcatccgtatgatcttggtgcctacgaaaatctaacaacggtattgggtccaagtatcttctgctggatatgcccattttcaagacacataggtaacggtcttcgttttcgaactgcttacgatagagtatctacttcatcaacatcaaaatgacatatcacttcttttttttcctttacattgccttggcaataacgaatttttcgatgcttgagggattgataaatgcttaccatatgataccctttttaagttatcctaccacacagatgccgtcaccttgcgaaaaagaccattaccgtcgttacaacaaccgataatcgtcaaggatgagaaaaaagggtcctgtaagttgacagttaaaccaggcaaagcagtactaaatttagaaataggatttgatggggttttactcttctttttgttttggtttttcccttctcttaccctttaccctttttgga

SEQ ID NO: 16709 - DNA, 541 bp, Gossypium hirsutum
  Clone ID: LIB3829-022-Q6-N6-H2
gaagacacaacaggttacaaaacaagacgatatacaaacccaattcttgctaattcaaccaagttttttcttattggtttaagcctttccaaaaggaaatgaaccataatgtttttaatgcacaaaaggatcataatatgttataaattgggaaaagagcaagtaaccttagcttctatttttgtaggatctatgatcaccccaacccatcaggcttttccagcagaaccaaatagatgcatcttttcagcaaccacagctttcatggcctctatagtagaagccattacatgtacaagatctcccttggggctgctcaaggattccatgtaagcttttcgtacttccgtgttcacattgaacttcctcacaccgcgctctatgcaccccttcacaagttccttagacaaaccagaggcaccatgcagcacaagaaatactcctttcttcgaacttagggcatatagatccttaagcaaatcaagtttgagattcgggccacttgctgggtattttccatgtacattcccaatgcatactg

SEQ ID NO: 16710 - DNA, 521 bp, Gossypium hirsutum
  Clone ID: LIB3829-022-Q6-N6-H3
aatcattccactgcaaactaaacttgtattatttcaacaacgattcccatcttacactgatattacactaagacaacatatagcaaagtgaaaggaacatacacattcaacatatataaaatttcatctagaagtcttatttttctcagcataaaatggacttatcatgctaacacaagaacataggtctggaaaatatgttattcttacagtactctctccttctacgagtcttcaataacttggaagacgtcttgattcttcattaaattcatatcaaaagcaagcaggagacaacagtgatgcaaacaatgccaacagtggcaataattgaaccttggtcaaatgctctctgcaagctgccagcacctgagaaatgctggtaagccaaatacgctgcaatcaccaaggaaatgatagcgccttgttgtgttccccttaagttcattacatggagaggggccacaatcaccaagagtaatgctagaaatggcaactcaagttcaccaggaatgaagaag

SEQ ID NO: 16711 - DNA, 560 bp, Gossypium hirsutum
  Clone ID: LIB3829-022-Q6-N6-H5
gaatgaaccacctaacaggtgctcagatatcacagcatgagaaaataatagatcttaaagcagacgagggagggcagcgctaacgtcccatgaaatgctaaaccagcagcaagccttccggaaagacttgaaaggcattcttatggacgaaatacagggagtttggctggaagaaacactagtaataggtaagtcatcgttcaaaaaggaaaactaagggaatgactgaagaaacatctgacgaagaaaattgcaagattctaaaccattcaccttcgactaccaagatctttaacattcaactaaccattataaatgcttggatcaagatttcatcttaacacttatgatggggagggccagctataagagccacacgttcccctcgagaggatttggattcagaaatttcaatcattgccccgcgaaactttcttatgttggctaaattgagacccttctttgcccatcactttaccaactgcatttgcagggatcaatatttaaagagttgaagatgcatgcaagccttcataaagctctgatgaatatgaggacat

SEQ ID NO: 16712 - DNA, 545 bp, Gossypium hirsutum
  unsure (1)..(545): unsure at all n locations; Clone ID: LIB3829-023-Q6-N6-A10
aactcaanaagattaaatcataagccatattattaaaaacatgtcaactcaataatttcaactacactngaaactgttattctctactgttggaacatgagaagcaataaaagctccgaacagttacaaagaaaacacacaaacaacaaagtagggcaaaacagaaatgctaataagcccttcgacttagggttgataaaaccttaaaaccagaacattctgcaaccattcaaatcattgctggttcgaagttggggaaacctaagctcaacggttcttgtaactccgcattgataggaaaaaggttacattgtgcatattgtgccattaattggtccacaagcaccaaggctaccatggcctcaacaacaggcaccgctcgaggggcaacacaaggatcatgacgaccgtggactagtagttctatctcttttttctcacgagtcactgtgtgctgcttcctactaatagcaggtgttggcttgaaagctactctcatgttgataatttccccattggatattccaccctgtatcccaccgnag

SEQ ID NO: 16713 - DNA, 464 bp, Gossypium hirsutum
  Clone ID: LIB3829-023-Q6-N6-A11
gacaaaatcttaattaacttattcactggaattgaaaattacggaaacatctcataaataaaaataccactacaatctagtggtaatgatacaagctcaagcaactttatttgtttccaagatcatacgcttctttattaaaataaaacaacaagagagatttatagatggataaatagacataaacaatggactaatatccatctaataaataaactgtagtccataattatatgtataggatttatgaatcagagtcaacttttgggcaggtagggttgcaaggataagggcagtcaagctttttgatggggctccgctcataataccagtctccaacagccttggcaattttcatgttgcttactaccggagaactatcgcttgaccattgtatctgctttcctacttgacagtgggcatagcacgaatctatgaacattcctttagatggagagttgacc

SEQ ID NO: 16714 - DNA, 534 bp, Gossypium hirsutum
  Clone ID: LIB3829-023-Q6-N6-A12
aaaaaaactgtatggtctatattcttagataaaaagttactccgggcaaatggctagtaatgatggtaaatcacctttcctaaaactgacgatggcagtcattagaattatgtagtttttatgtaacatttaacaacatatctgtccaaaagtctggattgatttacaaaggaacccagagtgtacccggttactgagttcgcatcctgctgctttctgctgccctgacttgagagaagtaaggatgggccatggcttctcttgcagttagcctgtcctgatgatcgtaccgcagcaacttatcaagaaaatcaattgcctctggagaaacaagatgctgattatccgcattaatgaatttggaccaaggcttacggctgtgccttccaacaagtgcatcaagttgaggatccaactctaaatggtacttgttcaaatatgcatttaactcatcagtccctagtaccttggcgattttaactagctgatcatagttatcatggccatagaagaatggttccttccggaatatca

SEQ ID NO: 16715 - DNA, 481 bp, Gossypium hirsutum
  unsure (1)..(481): unsure at all n locations; Clone ID: LIB3829-023-Q6-N6-A2
agatcaaaatttgaaagtttatgatttcaaagatctagaggcggccacagnaaaatttcagcaacaaatacaagatgggtgcctctgtttatcgaggtgttttttttgttgaattgctagccataaaacaaatgagcaaggctgtggataaagaggtaagcttgctgcaaaggattaatcatttcaatctaataagccttcgtggggcttgtgagcactctggtgtcttttaccttgtttatgagttcatggagaatggttctttaaaagaatggcttcaaaacaagagttgccagaaattccaggtatggggttatagaattcatattgctttagatgttgctaatgggcttcattatcttcacaacttcaccactccagcatatgtgcataaagatatttgtagtgacaacgtgctgcttgatcgagatttgagggccaagatttcaaactttagtctatctcgatcagcagaaagaga

SEQ ID NO: 16716 - DNA, 448 bp, Gossypium hirsutum
  Clone ID: LIB3829-023-Q6-N6-A3
gtgcaaccaacctatcttggtactaatgatggagcgacattagctttctgaatacgatcaaggtgcttacatgttttacagcactgcgtgatcacatgccgggggctcggatcctaaaccaatcccacgtcttttaatccaaggttttcaaagtatgatgaaatctacggcccaaaagttgcgttgttacctacttcttggttaagtacggaggggctaccttttatcgtgtaaaagggaaaaaaagaagcctgacagatttctcccttacttacgattgtactttacgggggctttaacaggcccgaatagcgtgcttagagttctaaccactaacccaactagtcctagattggattaaacatttgaatgtacacattttgcgaaagagaactatgggatatccgacctttttaccggacccctggacttgcaccaatgtacgatc

SEQ ID NO: 16717 - DNA, 465 bp, Gossypium hirsutum
  Clone ID: LIB3829-023-Q6-N6-A4
tttttttttttttttttttttttttttttttttttttttttttttttttttggttttttttttttttttttttttgggttttttttttttttttttttttttttttttttttttttttttttttttttttttttttttggaaaaccccttttggccttttggaaaaataaaaggaaggtttagggggtggcccgtttccattaaaaaagggaaaagggccatggcctaaataaaaaaaaaatgttaaaaacccccaaaaaaattaaaaaaaaaaggggaacaaaacccctttggtggggaggggcaaaaaaaaaaaaaaacccccttaaaaaatttggggggcccttgggtttttaaaatttggccaaaaaccctaaatgggaaaagaggggtttacccgggtttaaaagattcccaacggcctaaaaaacaaaaaaggtgcccaaaaaaaaatttgcctttggg

SEQ ID NO: 16718 - DNA, 534 bp, Gossypium hirsutum
  Clone ID: LIB3829-023-Q6-N6-A6
caaattcgcaatgtcattttcacttatgtctacatatttcataaaacatgtcaactacaaattcttcttttacacactgacaacagaataatgcctgaagaacaaaataagatcccttgacagagttacgtgaattagattttaaaaggggaaaaaaagaacaccatagtaaacacctattcctttgcaaaattgtacagaattctttggtgaaccaaaccgctgcaaaatgaaaatccattctctttagttaataagcaaacctagaactagggctggagctttaatcgccttggctatccaaaacatttactagataatcttcccgaagcagtggagcaagcatgctctcaacggaggacctctgcttacaagtctcctcaagaatcaataaccgagcagtctcacaagccttagcaatatgaaaaccaagtgtccatctcccatcagcaggaggagtggaaaccttagattggctgcctttagctttaacaaaatttggttcgaattctcttatccgaagatgtaaccatg

SEQ ID NO: 16719 - DNA, 357 bp, Gossypium hirsutum
  Clone ID: LIB3829-023-Q6-N6-A7
aaggtataaggccttcaacaccttcataaacctaaattcaaactccacacgatcttacagacatcaaatatcaattttccatttgcatatgggataactccctactacatggacccagcaacatagaagagctaatctactcagctagcgcaatgggggcaacattgcaattacataactacccactttttttaagggtttctacaggacacatacaagcagggtggacatgttactgggtacatgtccatgttatcaaatatttcaccattttcctcaaaacataagttggcagcagggaatccatcacccaccaaattacttaagcagcaaaagctgaaactcacaacacgtttc

SEQ ID NO: 16720 - DNA, 546 bp, Gossypium hirsutum
  Clone ID: LIB3829-023-Q6-N6-A8
acactaccaaatttcgtgcctttcaaagtaattgaaggtaattcatatattcccaaaaatacaaaatatttagaggggaaataaccaaaaaagaaaaggaaaacaattggcctcaaagaggggcatatgatacgcctaacaaatacttccaacacacagttattcaaatgatttaagacaaatttcctctggatcatcttcgatataaaggatgatgtccgaccttggatatgcctctcacttggcactcgcaagttgggtgcggagcagcttggcagctgcaaccatgttgttcagggctggcttcacctcggcatacttgcgagtcttgagaccacagtctgggttaacccacaagatgtttgtctcaagcacagcaagcatcttgttaattcggtcagcaatctcttcggttgatggtattctgggagagtggatgtcatagacaccagggccgattccagcaccatacttcactccttcacggaatacagaaaggagcttttcatctgaacgtgagttctcgatggttatcacatcagcatc

SEQ ID NO: 16721 - DNA, 531 bp, Gossypium hirsutum
  Clone ID: LIB3829-023-Q6-N6-A9
gggtggagctcctcgtcgcaagtacttataatagcataaaatgtaaagtacagtacacacaagcttagaaagaaacttgtatataacgttataaataatgggtcctgaaataaaaagaaaaaaaaatgaagttaacatcttcacattccttgtctctacaccaaacacttacatcacttgattaagaataaagtcggtagagttttggggggaggggagggggaacatgaacgacaatggacccaaaaaacgaaagagaaaatgatattgtacttcccctagtcatttcttttaccaactcaatcctgaaaatcatgcatatgatctaaaaggtagttggctgcaagttcctcattcttgttgcacgcaaagaacacttggagcacagttgcacgatcaaaccccattgcttcaagccgttctatggcttcacgttcttcaggtgtgacttgcacagcttgtggcatcgcctcagctaattgccccaaaatgtttccctctccaccttcagcaggttcattgatcaggcga

SEQ ID NO: 16722 - DNA, 544 bp, Gossypium hirsutum
  Clone ID: LIB3829-023-Q6-N6-B1
gagactggcaaacgcactattttagtactagcatgtgaaaaccaaaccaacccaaaccgaattcttctcgttcaataatacagcccatataatttcagaggatcattacgattccaagtgctgatgaattgcattgaaaacaaaaccaaaacccactacgataactcacattgcatctatgtactgtaaacctgcaaatataaggtacagagaacaatttttatgaacttatcactgctgtccctcgcctgactcgtgctttgaagcttccttgatctcatccccagcctcatccgtgatgtcagatgtccaaagggtcaggttgtcccggagaagttgcatgatcaatgtactatctttgtaagattcctcacccaaagtatccaactcagaaatagcctcatcaaaagcctgttttgcaagattgcaggcacgatcaggtgagttgaggatttcatagtagaaaacagagaagttaagagcaagttccagcctaattgggtgaggtggagcaagctcagcaagagcaatatcctgggcagac

SEQ ID NO: 16723 - DNA, 564 bp, Gossypium hirsutum
  Clone ID: LIB3829-023-Q6-N6-B10
agacaaaaactgtaattgtgttccattttcaattttcatggccacatcataggttttctcaattacaggaagaaaagtattgagatttttttccctatcttatgaaagcatacacagatgaatctgaacatttgagggtcatagttatacaaggactgaatggggactatataatgtacgatctaagaaacatatagctcagcttttccatcaatgaagaggctcatgaactcttctccatcaacagtttctttctccatcagaagttgagcaagcttgtggagaatgtcaatgtgagttgtgattatctgctttgcccttgtgtatgcagtctctactaaatcccttacctctgcatccaccacatctgctgttgccatggaatagtctttttgtgatgacatctgttgacctaagaaaggattgccaccacctccaccaatggcaacttgtccaatctttttgctgaatccaaatctttcaaccatctgccttgccactcgtgagacttgcataaagtcattcgatgctcctgttgtcacattttcctccccgaaaatactt

SEQ ID NO: 16724 - DNA, 374 bp, Gossypium hirsutum
  Clone ID: LIB3829-023-Q6-N6-B11
ctgggggaaacaaagggggcggggggctgttttatttcagggggaaggatccattcatcaggttcatgcctgcaaaatttaacaggctgcaataatttatgtttctaaggttacaaaaaatctttaacattggactgatcccatcaaattgcttatgctaaaaaagggggttgatctgccccagcttaactggttttgctggggcatttaaacatccatgcgttctaaaataccccgggctttttcctttgttgcaggaactacatttcggatcttaaatccattttttggggcctttgcctctggccggcaccctgaatgtaaacccacccgtccccccacgcgtccgcccacgcgtccccccacccttccgg

SEQ ID NO: 16725 - DNA, 535 bp, Gossypium hirsutum
  Clone ID: LIB3829-023-Q6-N6-B2
aagaaattctaattatattatgataatagaggaggggagaagttcatattaaatatcctctagaatagaagacactaatgcatataacaaaataagccaaaagaaagccaatgttcttaatttttttccccaacttgaaaacctagcgagaaaagcatagaaactataataatatcaacattaaatttaaaggctttcctatcactcgaatgcccattgattctccctcctaacctcctcttcttcctcgggggtgaaatcgttcttgatgttgaaggtcttgcgaatctcctcgggtgtctttccctttatcatatcagccacagtttggcaggtcaagtccagcaagctcttgatattcagatagttcgctgccaggatgaggtcaaagagggtattttggtcaaccttgacaaaatcagcatcccaagccttgagttcgtcatcgggagtcttttccttgtcggcagcagcatcgacatgcttcttgcagtactcaaggactttggacaagatcttgctggtgacgtttggg

SEQ ID NO: 16726 - DNA, 525 bp, Gossypium hirsutum
  Clone ID: LIB3829-023-Q6-N6-B3
aaaccaaatccacaactgtattttcataaagacagattaatggaaacaatagtatattcagttccctcgactcactgttatataaaccaacaatgtataagaggagaagctagaagccttcatacccattagattcacgcacaaaccccttaactaggatgcttagaaaaggagtaaacctgcgttcaggacgttgaacggtatttggccatgcttcaaacaaaaaacatcatgtttttcaggtttgcatgcagcttaaaccaaacatggaatgaagctgccgatgacattgttgatgacaatgttattgatgaaaatcaggatgatgttgaaatggcaaaccgtcttttaatcattgcctgggaacacaaacggcccctatatgcaacaaggtctgcataattcacaggtcggaaccagatataccggtttttgtgcaccgtgcaaatgtaaagcacatgttgtaaataatctcctgcaactgatcagaagagaacccatgctcatcccacaagacatggtaga

SEQ ID NO: 16727 - DNA, 514 bp, Gossypium hirsutum
  Clone ID: LIB3829-023-Q6-N6-B4
atggtgcaagcatgtaatgtttcgacatcaattggtcaccaacatgaacttaacatagtagaaacatcagtcaagatccaactgaccctcctcccaaggaaccaaaccccctatacataatttctagtacagagcaaacctttggagcatttaaaaggattccctaaagtagagactgttataaccactcactacaattttttttccatgttgggacacctatatcaaagttgaagcagtggcaacgccattacaataccaaagatggaaacaagcaacaacatcatccacgtcgggaaagactgtttctggtttcttcgggtattcctgagggtatctacttttttaacatctttccctgaagagttaacaactttttcagtctcgggtttaaaattttctccttgaggggattctggtgataaatgctctgacacaaactgctgctgcttgttgggcttatccacatactccggaaacagttttctgaatgtggggtttttacaattaaatg

SEQ ID NO: 16728 - DNA, 513 bp, Gossypium hirsutum
  Clone ID: LIB3829-023-Q6-N6-B5
cttagcatggggggtatgcaaaagcttgaatttattgtaaacagttcaaagtttctgttacagtcaaacatggagatatttcattttctttgatcatgccagcaacttatccagtaagtttccaaaaaaaaaacttgtcttggcccatccagtactaatagcctcagcctcgggtgctttggcactgcctggatccttctttacattaagcatcatcgggtgcccgatttccctgcggagggcttcgattttcttcgattctactgggttcccgtaagtgtctttcacgtaaaaaacattcactgcttcctccccaattgtagagatccctgctttttttactgacaatccgttctttcggagaatcctcgttacttcaaacaacaaaccaactttatcctttgcacaaagctccaaacttaaaccctcgcttactcttcgatgaattgaagcttctaaacatttaatgactctttctttctctccttcagcatcaagtgtgcagccatccat

SEQ ID NO: 16729 - DNA, 538 bp, Gossypium hirsutum
  Clone ID: LIB3829-023-Q6-N6-B7
aggtaaatatgcaaattccattcaaagagaaaccatacatagatgcaaccggtaaacaaagactagaaattatttaaaaggccatcaaagggcacaatccttcacgtaaaaccagaaaacccacattaaggaagaccttaaggcttagaacccaccacgaagacgaagaacaaggtgaagagtggactccttttgaatattgtaatcagccaaagtccttccatcttccagctgtttcccagcaaaaatcaacctttgctgatctggtggaattccttctttgtcctgaatcttcgctttcacgttatcaatcgtatccgagctctccacttctaaagtaatggtcttaccggtcaaagtcttgacgaagatctgcatccgacctcgaagacgtagaaccagatgaagagtcgattccttctggatattgtaatcggctaaagtccgcccgtcctcgagttgctttccggcgaagatgagacgttgctggtctggcgggatgccttccttgtcttggattttggctttcacgttgtcg

SEQ ID NO: 16730 - DNA, 407 bp, Gossypium hirsutum
  Clone ID: LIB3829-023-Q6-N6-B8
gggggaaaaaatttgggaacctaaaaagagggtaggggttaaaaggaaaaaaacccctttaaaatacaaaaaacctgggccttttaaaaaaaaaaaataaggggcccccaaaacaaaaaaaggggtgggaaaattaaccccaaaaggggtttttttttttttttaaaaccaaggaaatttcatggcaaaaaacccccggggggggttgggaaaatggggttttttttaaaatggggggggggatgggactttttgggcacaaaaagggggggcccaaatttaaaaaaaaagtttttgggggagtgggggttgtttccaaacaaaaaatttccaaagggaaaaaaaagggggggggggtttcttgaacttaaacaatttcattgtaaaaaattgaacccatgcctggg

SEQ ID NO: 16731 - DNA, 559 bp, Gossypium hirsutum
  unsure (1)..(559): unsure at all n locations; Clone ID: LIB3829-023-Q6-N6-C1
gttcaaagaaatgaaaactgcctgtgttgtatccaacttatgtctacataccttcnagcttgaaaactacaagttaaagagttattagaatttggaaaacaagaactagcctgcatagccaactttgcaaacctactatggagataaggacctatgtgcactcaaggcaaaggattgtttaacttcggtgcaccataacactgaacatcatctgaactaaaaatatagaggtcaatcgagtttccatcgctggttccaatggtcttccaaagtttgctcctgctctagcttccttctttttgaatccagatgattgtttctttttagagatgtatcttgttttacactagactctttcctcttctcagagccaaccgtttgttgatcaggctttttggatgctccatttactaatttagtactcatttcccctgtaactgcattaagaaaccttatgccttgagagtgtctatttgttgtcactttatctccatttcttaatgcccgtttgagtgcatccacagacagtagtttaactggcttagaggccttttccatg

SEQ ID NO: 16732 - DNA, 558 bp, Gossypium hirsutum
  Clone ID: LIB3829-023-Q6-N6-C10
ggtgattgaagaaggtcttatttattgagcattgaagacaaacaatcagagattcaagttgttaaatgatagaagccatagcttaggtttatataattggcaatagaatttgaaagaaaaataagttatagaagtcctctaacgtagaaataacgaagcaattcacataacaaatagcagacaacatcacatttcatatgcaaataaatccaaacccacacactagacatcctcctcatcctcccgatacatcttcatcatctcagcacagccaacttcagccttgtcaaccatgaagcccatgctattggcataacgggtggtggatgaaatgccattggagttggtcaagataacacgggcacgttcacgaccgggggacattgtggcacatccaagctgggggctcttcacaagaactgcatcacagatctgatccaagtgatcctcggatacacgaatctggtattttccggttttgtcggtatatccctccttctcgaaaacaactccgccggtctttctgtcggagcataccagcttaaccatggcatcagc

SEQ ID NO: 16733 - DNA, 486 bp, Gossypium hirsutum
  Clone ID: LIB3829-023-Q6-N6-C11
aaccgaattaagggttggatgaaatgtatcatgaaattcaagtttaagtacgcatttcacattcgcctaaagctcgagggctaaacgtagcgttaacccttttattcatatatacttggatggatccaaataccaacaagctaaagtagctgcaaaagataagaaaatacaaaagcataaattcaagttcagcaacctgggagcatcattcaggaggcttgagcatggtttggatcgagcttagcagcctcaagatcagcagctttcttcagaaaactttggtcatcatcctcaagaaccatctggatagggcaagatcccaatccatcagcaatagcaagcagaatcttcttcatctcagatctgaactcctggaggtcaacggtgccgctgccatcgcaatcaaacctctcgaaaatggagttgtaaagctgagtgagctcgtcggggggagtggcgacgtcgacaccgaagtgggactccagg

SEQ ID NO: 16734 - DNA, 542 bp, Gossypium hirsutum
  Clone ID: LIB3829-023-Q6-N6-C12
aacgaattgatgattagattgaaaagtaaagtaggaatagaataacatatttagaatccattgatttatacacaaaggtagtaacttgctaacaaatccaactaaaatacacaataatactccccaccctaaaaattcatgatttcattctgccactcctttcttccttatctctttcagtatcccgtcggaaattcgcaatcaccatacttaggtggttgggtgacgacgtaggccgccccgccaaaataacacgtccccatgtggcgtccgttcttttgataataactgttgaaagcgaacgaagcgtgggcttccagggtgttgggatcgtaacacgtggcacctggttggatcggatggcaatctgcacctccttcaccgcaggcgaaatctagagctgcctgcagcttctcttttccagcttcaccgttcgcaacgcaccacgtgttccccgtcgtactcttcgacacacccccttttcctctgttgacgggttgattcccggccaccggcgaccgcctgtcatggtaattcttcaa

SEQ ID NO: 16735 - DNA, 477 bp, Gossypium hirsutum
  Clone ID: LIB3829-023-Q6-N6-C2
ataaacggaaaatcctttttttaaaaaattcaaatcctaatatcttttaaaaaagggaaataaataatctaatggttttcatccttgcttaaaatgggaaaggggtggaactttttggtccaaaggaaaatcgaataccaaatcatacaacatgcattttttccctagccactgcataggaaaaaaagggaaagggaaaactttttcatttcagaatccttggggaactggtattaatacaaactttttactaagctacgctaatgcataagggcaacgggggcctcctgaatgaaagggtgggtgacatgcacaaattgttcggtttcccgctccaccttttcccaacaccgacgagctccttttccctcattcatctttttcacgaatgcaacaaaccgtttccaattgcccggatgaaagagcgatgggttcatcctcaagtacgtaaatgcacacatttttttatcaactggt

SEQ ID NO: 16736 - DNA, 325 bp, Gossypium hirsutum
  Clone ID: LIB3829-023-Q6-N6-C3
aataaatctacaactataaagtacttttattttttaatttacaatttacggtggtgaagcaaggagacagaaggaactgaacttcgagatctaggctcaaagtctcacctctgatttatcaatagatttattgataattggattataaaaagctatcccaactgaaacaacatagatctctaccttattccatctcattttcaccgctccatcatttttaactttttcaaaaacagggtaaaaaagaaataaaatcgacctacctttcaattaaatcaatatatcacgacttaatttgatcttcaccaactcaacgacagatcca

SEQ ID NO: 16737 - DNA, 560 bp, Gossypium hirsutum
  Clone ID: LIB3829-023-Q6-N6-C4
agataggaatggggagatcattattgataaatgggcaaacacttgaatcctcgttagttacaaaaagaataacaaaatcccgcggtgtctttatattttatttaaaaaaaaaagaacactgtaaaagccgcaaactcaaaggaaaaataaataaaggaaggagaagaatgcagagttttgtgacactaacatgcgcctctgttaagcatttcagtgtattccagataagaaatttgtctctgcaacttcatttgctcatagaagttagcaatgaacttacccgccttggaatcaatctcttcttcctccagcggtaatgtacaagcagtcctctccctgtccttatcatttccttgttcctccccttgcttttcacaagagtgactcttgattccactatcgtacccgtaaactccgtcctctccatcgatgccgaaatcgtaatcgaaatccacatcctgagtgctcatgcaaggaagaaggaagcgcatggaagcgggacggtgcatcttcacctggaaaagggtgtctcatcgaatgaaagctggcgttccttaaaa

SEQ ID NO: 16738 - DNA, 517 bp, Gossypium hirsutum
  Clone ID: LIB3829-023-Q6-N6-C5
agcttgaagctaaagtttggatccttaaaaggtaaactgttgaaactgcagtcaatgcacctgccctgcttgagtacaacagggttctatagagagaaaaatgctcttaaccgcactcaaattcacgacctcaagctcggcatagccattgatacacattcactcttcaatgcacgtcactatgacttaattcatggtctgtacataatgtttgtggacaatacatgagatttcataactatttgaaccttttattcccggaaaggaaaggaacttgagctaaacttgagggtaaggaaatgtgaaggttattaatcgctaaataagcagcaataccggcagcgtaaccggcaaaagcaaaaccactcaccttttggaaataccaaaagaagtcgactttttccattcccatgtatgcaactccggccgcagacccgataactagcatggatccaccagtaccggcacaatatgcaacaagttgccagaactcggagtcctggggaaatgaagtgag

SEQ ID NO: 16739 - DNA, 191 bp, Gossypium hirsutum
  Clone ID: LIB3829-023-Q6-N6-C6
gattgggaaaaaaaatacccttctgaagaatttaggagcttattacaccacaccaccactttatcaaagtatccaaacggaaaaaaggttattactaatattatttagtaataggtatcaaacatagcatcctaagcctgaccgacccttaattcattgcatatttctgagtccatgagcgagcagtgctc

SEQ ID NO: 16740 - DNA, 318 bp, Gossypium hirsutum
  Clone ID: LIB3829-023-Q6-N6-C7
acggggtaatgggggaccggcccgggaaggccggacaagtcgcgccaggggccggaagattacaacccgggcgaaggagggggagggggggccccggggggaaaaagggacccccgggggaaaccaggaaaacccgaaaacggaagaaaaaaaagaaaagccagggagagaaaaaaaaaaagggaaaacccaaaaagtaagaagaaacaaataaacccaaagaaaaggacaaacccgaaaagagaagggaaaaaagggaaaaaaaaaggggcaagaaaaaaaagaaaagggaccgagcagcgggggaggagacaaacg

SEQ ID NO: 16741 - DNA, 536 bp, Gossypium hirsutum
  Clone ID: LIB3829-023-Q6-N6-C8
caaatatgaatagatgcatattttttattttgctaagaactgcaatcgacttgttcgaaacccaaaccaggccttgtgatatgcaagtgcaagttcctatgtcaaaggccctgcaaactagtaatttggtaaatcggaaaccatgaaattaggtctcgaaatacctgagttaataggctgaaaacaaacttgaagcacccaattaatacaaaactacatatttgagtctatcagcctgtacatatgtgatagaatgtgaaattcaaccccaagttacagttcggccgattggctctttaggcctgaaaacgtaaccccatttttaaaatcatagtgaaaaaggattgcacattcaaatgcttattttacttgtttaagttaccctattaccaccaccatggccctgctttcaattcccgcagccagaggcttgcctctaaaacttgaaccaagcagagccacaaatttacatacagaaacaccaagacagaccactacaaagataaagaaagcttaaggtccaaaccacctccacc

SEQ ID NO: 16742 - DNA, 537 bp, Gossypium hirsutum
  unsure (1)..(537): unsure at all n locations; Clone ID: LIB3829-023-Q6-N6-C9
gatgtaacagaatcatttcatataatcctttcaagtcattctagcatgtgatgccacagttgaaaaatattantcgaaaacatatataaaaaaaaagcttaattaattcagaacaaacaaccccacgcccccaccccgaagaaaaaaagaagttaatttgtttgtttattttagtatatgaaactatcaagacttgaatcatgttaaacaataagttgggcattttactacgagacacgttgttgacagaatatgtttgatcatatgtaaaagaatttagaacgcttaaatggatggatgtgggaaagaaaaaaataaaagaaaatgaagatggatatatatatatatatatcatttccaggcaacagcatcaatctcatctctggctgctttgtaaagctccagccttttagcaatctgtgttctcttttccatgagttgagggtcctcatccaacattgcactcagtcgttccttctctttcctccctacttgggcataaaagtgggtcaacagtgacctcttggcctctctcac

SEQ ID NO: 16743 - DNA, 492 bp, Gossypium hirsutum
  Clone ID: LIB3829-023-Q6-N6-D1
ccattgaaagatggtaaggggcgggttctttgttttttcccgagttcaagggaacagagtctagattgaaataaagcattttttttaaaaaaaaaacaaataagttttagggggagatgacaatggaatgcccaacaaaaggggggaatattaacctctcctatcatctatcaaggagaatgagaatgatccttctacctgggaaagaatggcaaaagaattttgaatttaggatttaaatgaaaggttgggttaagcaagctttttggcacgtccgcttgaaggagcaacttccttttttttggaaccaaatgcctcgggcttttttgcccatgcaggagctctgtcaggctcataacgatagtcataaaaaagttcctctccagcattaattcgttctttcgaaaatattcccacccggggatccccagcaaccataatgacctttgcatagcaattaggatcaggagaatgattcgcaaacttcaactt

SEQ ID NO: 16744 - DNA, 319 bp, Gossypium hirsutum
  Clone ID: LIB3829-023-Q6-N6-D10
ggggaaaaaaggggttttaaaggttaaaaggggggaaaaaaaggcttaaaagagggcccccgggggcaaaattataaaaccgaaaaacaaaaaataccccaaggtttaaaaaaaaaagggttttaaaaaagaaaccgggagggttaaaaaaaaaacccggttttttttgggtggagggaactttacaaaagacccccgggggggggaaaaaaaaaaaaaaggggggttggaaacttgggggggagttgcccaaaaaagaaaaacccctttccaggggcgcggggggtacgcaggggaaaagggaagaggagccggaggg

SEQ ID NO: 16745 - DNA, 554 bp, Gossypium hirsutum
  Clone ID: LIB3829-023-Q6-N6-D11
agaaaatagacgtgtgtagtactagccaggcaaataatataatattctatacattgttcatatattaaatcgggtttccatgtttgaatttaccccaaaaccgcgaaagcacaataaataataaaacataatcacttccatagcttccgtaaggacatgttcttctcgctctccttcttcattactttcgccaccgccatctcaaaatcttcttgtgttacgtggactctcctttccctcaaagcaaacattcctgattctgtgcacacagccttaagctctgcaccagaagcaccgttcatcttctcagcaatcttctttagatcaatccctctcatcaaattcattcttctagaatgtatttttaagatgtcgaaacgagactcctcattaggatttggaaattcaatcttcctgtcaattcgtcctggcctaagaagagcttgatccaagatatcaatccgattggtggccatcagaaccttgatcttgttagatgcttcaaatccatcaagctggttgagaagctccaacattgttctctgtacctcact

SEQ ID NO: 16746 - DNA, 551 bp, Gossypium hirsutum
  Clone ID: LIB3829-023-Q6-N6-D2
gatgctaattgtatctttaactgagcaatagctacaaacactacaaatcttgctgataatgtcagatcagcttttaaaatatggttatattatacatcaatgataaacttgccccaaagctcccttttgcaccttacctcgtagtaaaactagtgattaaagggcaaagtcaaaaaaagtggatgctaaagttagaacaagatccatccttctgccaattccatggcagtggttttaacacctctgaatttggaagaacttcattaaattgatcttcttaatggaaaggcatccaccaatgagcctatgtaaagtccaatcaatttgtttttgacttttttatctgttaaaggaggcagctgaagtatcatcataatgtcctctccatgcatttccactgtcgatctcactacaagcttgattgggaactggcacatttccaaggtcaccatccaagctcatttgttgtacttcaagggatgacagtattttaatgctctgaacacaacttacaaattcttcccaaggatcatcaccaacaagtaatatgt

SEQ ID NO: 16747 - DNA, 561 bp, Gossypium hirsutum
  Clone ID: LIB3829-023-Q6-N6-D4
aaaaatagatataaatgttctcttattcatctgctctcaacaaagttagaaaaataatcctacacaacctttaccttgtaatattgttcacggcaaagaacatcaaaataaaatgccctatgattacaatatgatagtatttacagtcttaaactcacatactcgtagatttataatggacaataggtagcaagaaaagaaaacataaccaacctcttcttaactactctattgatttttcttgaatctcgaagttgaggacggcgatttaaggttaggctctgaagtcctaataatgaacaaaaatgtttcaagaagcatgccaaaaaccaatccaagaatacctccagcagaattcatgataggactgtggttaaacaacgctctgaatgcaaaataaccaagcaaatacccagtaaacattgtcagagcaacatgtaaaccaaagccaatttgatccttataagtagagaaaggttcattgagatccttcttcggcgtgatatctttaacaagctcttgatactctttcctctctgctagttctttaagcttccttaa

SEQ ID NO: 16748 - DNA, 547 bp, Gossypium hirsutum
  Clone ID: LIB3829-023-Q6-N6-D5
aacaggtgaaggaaattcttatataaaaacgtaggagaccatactacatacatccagaaaacccgtcaaacatcaaaccctattttatatctcaaatccccatttacaagaagaaaattgaaaataaaaaattgcatcccctgccaagcagctttcacttgctacttgccaattctctcacaatcatcatcccttacatcatcttcctagacctatagctgccaataacactaatatttcattaaattaattaaccataacaataatattaataccctcgttttatcagtaaatgagggatgatgatggtgaggattattatggatcagtagtactggaacatgtctggagaggccatgatgggttggttaaggtaaggtagattgaaagggttggtgaaaccgtggtcacaagtacttgtttcaaagcactgatcagtttcgtacaccaactcactggcgctcatggtgttgagataactgaggatttgattcagatagtcgagtctttgactcagttccatcatctgagccctcagaactgagtt

SEQ ID NO: 16749 - DNA, 200 bp, Gossypium hirsutum
  Clone ID: LIB3829-023-Q6-N6-D7
ttttttttttttttttttttttttttttttttttttatttatttttttttttttttttttttttttttttttttataattatttatgtaaaaagaaaataaaaaaatttaatttaaaaaaagaaaaaaaaaagggaaaaaaaaaaaaaaagaaaaaaaaaaaagggggaagaaaaaaaaaaaagagaaaaaagagagagg

SEQ ID NO: 16750 - DNA, 534 bp, Gossypium hirsutum
  unsure (1)..(534): unsure at all n locations; Clone ID: LIB3829-023-Q6-N6-D8
gcaaaatgaaaatgccaatgggcttttgttgcagtaagtaattcttagctgaaaaacaaactgcgcaagacaaacttcaaaacctccacttactgcctaagaatttaatgaaacgaaagagaaactaggtttatagatgccttccgctattcgcatccaacctatttttaaacataggtatagtgatacgaccttctaaataaaagatacaaacaagaagaagaagaagaatgaatctacccgtgttagattaacatacattatcaatatatatcaccaaaatactcctagactagctgtaaatttcataagtactccatccacttaagtacaaacttaccagtctttctatctctttagcagtcgtggacaaaaacaaatacctcattcattattacacaacttactctttaacatgttaataaatattcatggtccagtttctatatccttatcatttcccagtccaagtgctaaatattgatgtttttaaccaaaacaaggaatatcatgngagtgttcttcaaacttaca

SEQ ID NO: 16751 - DNA, 523 bp, Gossypium hirsutum
  Clone ID: LIB3829-023-Q6-N6-E1
atctcaaacctcttgagtattattttataaagataaatacatgaactacgactacttaactcggagttcgtaaatactcataccgaagagtagtggtgaggcctcggagttcgtaaatactcataccgaagagcactagcggacctcacggtttcaagaggtttaatatatatagatcctaatcttacaaatactaccatttgaatcctactaggtagtaaacctataaataagctagctagttaggccatggtaccaccagtttgatgcagcattgcatcgatctcatccccatcctccatttccaactcatccggagtctgctcgccccgcagacggggaccattgaaaaggaaggcaatagagttgaaatccaccgattgccgatcacaataagcattcataagtttctttagttgagtacttcttttaatcctaaagaacacttcattcccgtcctggcctttgactttgagattgatgtgagccgtttgatcagcgggtttcttgtcctcctcttgat

SEQ ID NO: 16752 - DNA, 538 bp, Gossypium hirsutum
  Clone ID: LIB3829-023-Q6-N6-E10
gccgcgaaacctttcttagtcaaaatgccataatacgatacaatccggattaaatcacagatcatgttttgcacaagtatttacatacaatcatctttgatacttaatcccataagtttaggagtgtactacttgaacagagcatggcactcgggtgttcagatttagaaaagattagcttatgcagcctcagcaaatccaatttgcatgttcccatagtcaaatactgtatggaactggcccataaatacatcacccaggatccagagaggtccgcgaggaggtggtacatccagagcagtgaatccactaatgcattgagccccatctccctcgcccactttcatgacatactgctcaggacggagctcaaataactttccagcaattgtgaaagagacgctgggcatagaagatagacttttacagtcaatacttgattctcccattggactaggcagccgatcacagagctcattgacatagtcaattatatggtcctgtgtctggttctgcttaagctggttttgcatccata

SEQ ID NO: 16753 - DNA, 531 bp, Gossypium hirsutum
  Clone ID: LIB3829-023-Q6-N6-E12
ctcaaaaaacaagtactgtttcaatcagtactactaacaattgatataactaccatttcattttcacagttaaatccaatgcatatatgtaagtagaacacttactgaagagctcagtccaaatagatccagttctgctacttgcatactcaatatgaataaagaaacattggtgtatagaacttggaacatacactaccaagtacgcatcttaaatatgagaagttaccatggtcaaggatttctagacctccactcgcacacaaactccataatttatacaatcatacgtacatcatgtagcaggcttccggccttctcagttgaaattcactggaaagaggtttcacttgtttttctatttgtcgttggactggacgatcacctgctagacttagatgcaacggtcctcaggactgtggaaacaccatccacgaattttgttcggaaaagaacgttggcgttattaaacatgccctctttcagtgaaacaacaataaactgggagtgcggaaagtgagccttaatcat

SEQ ID NO: 16754 - DNA, 528 bp, Gossypium hirsutum
  Clone ID: LIB3829-023-Q6-N6-E2
gctcacgtatttggattcttttcttgcctttggttgataagtagggtatttgcatggaattatttccccgttgacatatttatcacctccataatctttgtttttgacgtctatgtatgaatccggtaaaacccaaagaaccccgggcaatcccttgaacttttccgaggtttcttccgaaacggtacattggaatcccgtatatgtagtggtgctaaaagcgtacatgttcttctttgcttcttccatgctgccaagcacagtagcaagagtgttaagataggtctcaatcatttgttctcttgttggagcagggtctttagggaactccataacgataagccaatggttataatcacaaccaggtaacattatcgtttccctttgctcattgctgctactcctcttggatgaataatcaccgtcgagtgctgctgcaactttgataactcgacgaggacgagtcgatggtgatggaagacggtgagtcagtgagttaactcgcagagtaggtgaagaagtgagtcc

SEQ ID NO: 16755 - DNA, 536 bp, Gossypium hirsutum
  Clone ID: LIB3829-023-Q6-N6-E3
caaaataaaaaagttctatccatatagtataaaataattaaaaaaatatcaaaatggtattaataacaaattattgacgaaaatggtatggggagggtgatgctgcctatggcagaggcgtgaccaccctcccacctgacatgaacaggaaaaaacagttaaaaaaagctgaaaaaagaaaaaaaaaattaaaatacaacaaaattaccttttttttttctcctttttctttcttttttttcttccttccttccttccctccctccctcttcttctccttctctttttcttttttctttccctcaccagccgactccttctccttctccttcttctcttttttcttttcttcttcccgaaatggagacagcagaaaaaaacaaggtgtgcatgcaggaaaccggtgccgcctctgccactggcaccatcggtgccgcctgtggcaggcacaccgccaggctagctttttttttttagattcagcttctttttttcagtttcagccttttttttttcaacaattttttctccttttt

SEQ ID NO: 16756 - DNA, 542 bp, Gossypium hirsutum
  unsure (1)..(542): unsure at all n locations; Clone ID: LIB3829-023-Q6-N6-E4
aatataattaaaattatattagnaagtttttttgtcacaaattacataccactgacaggagnaaaatagaagggagatacaatctggtaatagttgaaccaaagctagtggcttaggcagctaagctaatgagcctcattttggttcacattttcatcaatcctcatctaaagacacgcaatgagtgattggaagatgtaaacccaccatcaaccataagattgtctccacttatgtaccctgcatcatcacttgctaagaacagcacagcattagccacatgctccacagtcaaatccaccccatccaggttcgcgtttttcccgatgaaagcacgaaaaccagtacgtacatcgctggttctttcgtcctcgtgcaagtgagcaaaggccaattcggttgcaacggcatacggagaaacacaattcactcttattccgtatttacctaactcagatgcaacattcctagtaaggcctaaaacagcatgtttagagcctgtatatgcatgaggtcctaggccaccgatgacacctggaaac

SEQ ID NO: 16757 - DNA, 509 bp, Gossypium hirsutum
  Clone ID: LIB3829-023-Q6-N6-E5
acttcatgacgaagccgagctagaattgagcctaactcttaatttcaatgttatgcagatatttcttccctcatctaagcctcatttctcctttaacccgtacatagcactcaggattatgagaagataaattattaaaggaaaggagtacaaacgaatcaatgaatattgttcgtcacaaccataatgtttgatcttctgaatgtacatcatcattatcaagcgtccctgtgtgattccttgagcaacattagcccagattcatctttttcgaacaggcgttcaatcaattcattccagcttacttttgtcttgcttttccctgatgacccaacagatgattcgccagttgatttatgggagttgtctccatcctcgtgctcgtcgaaagttccataacgggaaggtaaataagcatggggtactgacagtgtaacggccctttggagtgcagctttgtgctcttcactatgttctctagccagagtttcttgccgttccattctctg

SEQ ID NO: 16758 - DNA, 553 bp, Gossypium hirsutum
  Clone ID: LIB3829-023-Q6-N6-E7
aatctgaatttcagttcattcatttcaaacaaaacatattctaaacaacattaccaacattttcctacaaccaaagtacacaaaaggaacctacatacattaacagataaatcaaaacaaaccctataatagacaaacaactaagccttcttaggtgatttctttggagactttgtagccttagatggcgacttaggctcttttgcagccgctttctcgtttttctttggtaaaagaactgggttaatattgggtaaaacaccaccatgagcaatagtcacaccagctaaaagcttcccaagctcttcatcgtttctcactgctaatagaacatgccttggaatgatcctattcttcttgttgtctcttgcagcattaccagctaactcaagaacctcagcagcaaggtattcaagaacagcagcaaggtaaaccggagcaccggttcccacacgttgagagtatcgccctttcttcaagtatcgtccaattcgaccaacgggaaactgtaatccggctttcaccgaacgagaaaccggcttcttctttggac

SEQ ID NO: 16759 - DNA, 531 bp, Gossypium hirsutum
  Clone ID: LIB3829-023-Q6-N6-E8
aaaagccaatcaacacatattggggcttatccaccattcatatatatctcaataatttaacattttttcaatctcattggaaatgggggccattgatacagccagtctacaacattcccatatctacagctatattatatcatatgtgatggtgttgtagttgcaacagccttgaataggctccttcgggtcgggctatcaattccgagtggctgccttgttccacaattcgactgtcttgcactactccgatgctgtctacatttcttatcgtcgagagacggtgagccacaagtactgtggtgcgacccctcattagccgttccagtgcttcttgtagtacacactcggattcagcatcaagtgcgctggtggcctcgtcgagtaatagtattgttgggtcctttagcacggctcgtgcaattgctattctttgtttttgacccccagagagctgaacccctctttcaccaacaggtgttttgtacccatcaggcaatgcactgacaaaaccatgcacgttagctgctc

SEQ ID NO: 16760 - DNA, 572 bp, Gossypium hirsutum
  unsure (1)..(572): unsure at all n locations; Clone ID: LIB3829-023-Q6-N6-E9
aatgaccaagatgggngaatatgattttagaaagaaattgtgcgagaataacttgtgctccgggaatcnnttcccaaaaaaaaaccacnnccaaattcattctcttaaggcccaactttaggggaggaaaacacaaacncctaaaacgtctgtggtagggattgggtgttgttggggctttcttcctctcttatggcaatcatcagcttttatggcatcagcaaatcccttagctcagaggagcttcagggtggagcttcaggtggtaatcagcaaagaaaaggcatcctcatcagccccgcatatttctcaaccaatgggacggaaaacaggngtcggaaaggagaactttgtcagttggcaactgtaacaggccgtccttctctccagtcaagagctccttgaagtaagagttgtcgaagataagagggttggtagtccatggtccctcaaatccagacctctccttgtggcaccttcccagggtgtggccaccagaaagagcaacaatgtcctggtcgctaagacccatttgattactaaacacctgcctcaagtgatcagctccctca

SEQ ID NO: 16761 - DNA, 550 bp, Gossypium hirsutum
  Clone ID: LIB3829-023-Q6-N6-F1
accaaattgtcgcatatcattattgaagcagttttaagtaaaaacattatgtattgaaaagggatatgaagtctggtatggttccactgcaaagaaaacgctttgctatttattgtgtgcagaaaggtttggggtcaggcattgatatcgacagtgatggcaccagcatctgacaggaggttcagaagctgacctgcttgatacttggcaataacagaatcacagccaccaatatgtgttcctgcaatgaacacattatgtactgtcctttgcccagtccactctgccagagctgcttgcatttcaccaccatcacttttttgatccaattcaatggccttgtaagaagcttttaactgagcaaacagctgcttaaccctattacaatacccacaataggttttactgaacacaacaacgggggttggaggaaaccatgtgcttgaccttgtcaagtgccatttgggtatcttcctggcttaacctgttggagcttagaagggaacccatggctgatttatattatgaccggcttggtggagtgtcttaa

SEQ ID NO: 16762 - DNA, 551 bp, Gossypium hirsutum
  Clone ID: LIB3829-023-Q6-N6-F10
aatgatccaactcattaaatttaatctcaaattaccaaaaaaaaaccaatttcacaacaaaatagatttccaaaaatccagaacaaagtttaaaccgaaaaggaagctaaccattttctacaactaaaatgcttaaaacactattagccttttttccatttgctgaaatttagcaattagtgattaaatttcactcttggctcttcttcttcttcttcttcttctttgtattttcatttgtagctgcttcatctttactcttctttttctttttcttggctgtcccatcctgctcgtttacgccatttgttttcccatcttcttcatccgcctcttgctccttctttcgtttctctttcttctttttcttctccgatttaccgtcctccaaggcatctccatttgtagcagcagctggagcatcttcggtttttgacttctttttcttgcttttctttgcggaagcttcttcaggttccacttcttccatttcagtatctttgttctgagtactttcaattgcagatttcattacatcgatgtttttacga

SEQ ID NO: 16763 - DNA, 530 bp, Gossypium hirsutum
  Clone ID: LIB3829-023-Q6-N6-F11
aaaggagcaactgtttttccgttacttacaaaaagctttgacatgcataacaggctcaagttaaagatctccaagctaatccccaaaactagatcttatcaagactcgaccttgcttcaaaaaagcacaacggcacaaacgtttttgttttaacatttatacagatatgcccttcaccaaaatacattataaatatccatcaccttccttcacctcttgggatgaaacctcactttcaacaggaactgcatcttaacttgagaagtgttataaacaatgtattcattatacatcagctcaaattccttcacactggatggaaccggtttgccacaaggaacaataatgtcatccttccactttacaaagtcagacttcttaggtactttctttccgagccctttggtagagtgctttccttttggtagtttttctatatacttggcctttgttagttcatagacctcccctaaagcaacttcactgagaagcatgaggcccacaggatttttcctatcagtaaagcaata

SEQ ID NO: 16764 - DNA, 549 bp, Gossypium hirsutum
  unsure (1)..(549): unsure at all n locations; Clone ID: LIB3829-023-Q6-N6-F2
atcaactaattgaatcctacaataatttccctgggttcctccccgngaaaaaaaaaaccaatttacaagaaataaattacttgtgtaggtgccaccgccgctacgtcgaggtatattagtgcaagggtttccaccagaaggtggcaccatacccctttgaagcacttgaattataagatttttatttgaaaatcacagcaaacaggtgatcttcaacatgagggagaggccttatggcggaaacatgttggtaggcgaataacaaaataatgcagaaaaggaatgtaacagtaactttaagcgaagccatattggaaaacacaaccatccttctagtaagccgttactcttactgatttaaataagcttcccaaccatccttccgtagcttctcagcttttgtcaagacatagtcccttgtgtcttcttgatactgattcattctcgccaatagatcagcatcaccaactcccaacatccttactgccagcaatcctgcgtttgtagcgttgtttactgcaaccgttgcaacaggaacaccccttggca

SEQ ID NO: 16765 - DNA, 497 bp, Gossypium hirsutum
  unsure (1)..(497): unsure at all n locations; Clone ID: LIB3829-023-Q6-N6-F4
aacaaggaaaacaacattttagaaggctctaaaattgcagtctcgactttttcaattacatttgngaaagcgaccaaataaaggaagagcatgcgtttatatgaaccatgtcatcagcgcctgctggatatgctgaatgagctgacctttagtggggtagcaataaccagtggggcttcaggtgaatcactgactgcaaacttatcgtgcatgaaacgactgtcgacaatagagtcatccttaaggactatcttgtaacaatagcagctcttcaaaccctcttgattatggtagcattcatgagacccgttcttcacttgttggaagttccatatgacactaaacttgcctaccgttgcaaccaaatgacgctcttgcttcccgttctcggtgacccatgaaaactgagcattacggaacttgttattaaccccagctagatgtgaatcgagccggatcaactttaacaaccttggtacccgtttccctggtgcccc

SEQ ID NO: 16766 - DNA, 549 bp, Gossypium hirsutum
  Clone ID: LIB3829-023-Q6-N6-F5
aagtgcactaataagactagattctgtttattaccatatggttgagttttacataattatggcaggaatagttggaacagttcatccaagggggaaacataaaatacaggtaatcacttcaatctatatatccagaaggcaaatttagaacttggactttctatgtctaaattaactgcaaactacagattgagcttaccggctaagaaccacgaatgcatggccaggctgccaaaggacataatattagcaagtgaagataacccatgaatcattccaaatttcttgttcatggctgcaagctttggattagtctttgcagcttcctgattcttcgaccatccaatttcatcaccaatgtttgcttctctctccactttgtgcctttgcttcatcatctcgatggtcatgggagtaaaaacgaacaaattggatagattgaaggcaaatgcagagactaaaaacccaagctggtacttctccggcatcgtcgctgacttccatggatgcaaataaccaaatgccgccaccgatatggcacaacaaacc

SEQ ID NO: 16767 - DNA, 565 bp, Gossypium hirsutum
  Clone ID: LIB3829-023-Q6-N6-F7
ataagatctttgaacatttgataaatcctaacttttgatcatcaaggatcagttttgtttaaattaaacaagtatttgtacacttaattctccctatgagacatttttaaaagaccggggaagaaaattagtatttagttgaagcctaaggctttgactggtatccccatggattgttgcttgcccacttccattgatctttgcacatctctgctataccatattttgctttccaaccaagttctttctgagctttttcagtggaagcataaacagctgtagcatctcctggccttctggggcatagtttaatggggattttctttccagaagatttctcaaaagcggcaaccatttcaagcacagatgtaccactgccggttccgaggttataggcaatacagcctatattctcagaggaaaaaagcttcctaactgcagcaatatgaccatcagctaagtccataacatggatgtaatctcgaaccgcactgccgtccttagttggataatcatgaccaaatacattaagttcaggcaatctgccgacagctacttgctgtat

SEQ ID NO: 16768 - DNA, 445 bp, Gossypium hirsutum
  Clone ID: LIB3829-023-Q6-N6-F8
gatgccaaaaaacataattacataacaattcaaactacaagtaaaacaatataatacaaacatattatgtgtaataccaattttggcctggcctattaacgaataaacccaaagaaaaaaacaagcccaataaacgggcccaatagctaattcccaatccaggcccgaaactaatggaaaatggaagggttgagaaaccctagcagtagccgccgcctccagcagtcccgatcggcgcacaactcggagctagaggcctcctccgcgagagttgcgcctccacatgcgcggcacccctcagcaaccttcataccttttcgctgaaatcgccgagttggtgccctctccgtcgcgattggagaccgggcatcgacggaggccgtgcgtataaggctgaccgacggcgctcaagggtttggagaagccctaaaagaacatataaaag

SEQ ID NO: 16769 - DNA, 416 bp, Gossypium hirsutum
  Clone ID: LIB3829-023-Q6-N6-G10
ctataaaaaactatggaaattataaatcccctcaaaagtaacattgacaatttagagaatttcttagaattttattccttcccttgtgaacatcaagcaaaagaaagtggtagtaaatgcacaatgccctcgatgtcgtcaagatgaagagaacagtaaccacatttttcgccagtgtcctacaactgttgagacttggaattacttaaatctgtcttaggtactgaataatgatattcagaatacgtgggagtggcttacttgggtctttgaacaggagactagtgaacagatccggtttttctattgtggactctggttgatcagtccaatagaatttgtcaacagcatgtttgcgaagcaagggttacagtctattttggtgtagcttatgaccaacaacatttcagatcggc

SEQ ID NO: 16770 - DNA, 526 bp, Gossypium hirsutum
  Clone ID: LIB3829-023-Q6-N6-G11
gaaaagaagatacttattccatttttatgattttaagagaacagtaacaacatcgatcaaaaaagagagaacccaaaccaaacagtaatagagaaacttaaaattactaactactaaacccaaaccaaacccataacaatataggcccaagcccactttgaaacctaaacttaagacctccagctgccttcagatgcaccgccgccttttgagtaacgagatccgccgtcaccatatcctccttcacggcgtccacctccgtacccaccaccaccataccctccaccatttccgtatccaccttcacggcgtccgccaccatatcctccttggcgaccaccatatccgccgccgcctccaccggggctgtaaccaccgtttcctcctccaaatcctccgccaccgcctccacttttgcgcgattgggcttcgttgacggtgatgttccttccatcaagattttgaccgttcattccttcgatcgcgtccctcatagctttctcgtcacggaaagtaacgaatccaa

SEQ ID NO: 16771 - DNA, 504 bp, Gossypium hirsutum
  Clone ID: LIB3829-023-Q6-N6-G12
aaattataaccaaaaccttttattataaacaagcaaataatctcaaatcacaaccaaaatggttcggaaattaaatgccctcaccaaacaacttataccaagcatttaaaatgtcattgccaagtgtaaattatcactcaaattgaccataggcagtatcgacattaatttcagaacattcttgaatacagttatccaacacaccgaactaattgccaacatatccaggttttatcaccaataatcaacctgttctcataatgatgtgaactccgctatcagtatccacgatgtcacttatctcaccaatattaaggctatatgttgcatcctcaaatggcttttgcatctggcctcgaccaaaaggaccaaggtccccgccgcgtttagcggagctgcaatcggagtggcgagaggcaacctcaccgaacttagcgttgccagaagtgatgtcgtcacggagggctttgagctgtgagacggcggcatctcgggtagtgttgg

SEQ ID NO: 16772 - DNA, 529 bp, Gossypium hirsutum
  Clone ID: LIB3829-023-Q6-N6-G2
gagataaaagctttatatatttgtttatatcaaaatatttaagcgtcaatgtccactcgagaaaataactataacaatctaagcgaggttatgagacaggttctgatgcggtaatgcaagcagggaacaaactgcttgccttaacgaggaactctcttccgactcagtatctcctgctctttcaatcgatgctggaacctggcaaggcgagcttgaaggccaaccagaccagcagccttgcgtgaaagcacaaagcttagttgggtcacataattgtcgatgaggctgcctggttggtccacctctgccaaaagcttcatttcttcacgaacaatttccattgtatcctcaatttcttttctgtgagcagcaattaaagcctcttcctcctcaagtattgcattgatattctcatcaggaggctcgggatcatattgtctatgtccaacattatttgcattgctataactaacagcatttgactgcctagactttgtagtggacaaatcagatcctcccccgtctttct

SEQ ID NO: 16773 - DNA, 526 bp, Gossypium hirsutum
  Clone ID: LIB3829-023-Q6-N6-G3
atgatagcttataaactttatatgataaattattttaatgtaccatgtgctggctgccatgaaaccttaaacataagcagagaactaaaaaagggtttataaattacaacttgtagcatttagccactgcattacagccggcttaatttgacaaacataaaactaggaacattttgttgaaccccatcataaaagacacttgttaaaaacaccactcggaaaccaccgcgaaggcggaggacaaggagcatagacgatttcttctggatgttgaaatctgacaagggccttccatcttcaagaagattacgtgcgaaaatcaacctctgctggactggggggatcccttgcttgaattgggtcttggtttttacattatcaatagtgttcgcaatttcaacttccaaagtgatggtctcacctgtcaatggcttcacaaaaattttcttcccccccctaaaacaaataaccaaatggaaggtcgactcccttttaatgttgtaaactgcaagtgttctgacatcct

SEQ ID NO: 16774 - DNA, 507 bp, Gossypium hirsutum
  Clone ID: LIB3829-023-Q6-N6-G4
aaaagaatattacctttttttcaagtagaaacaatcagttacaaagatgccattactaattctattggggcaaaaaaattatcatggacttggatctctctcacttagccaaaccattttcgagcttggttatgcgtactattgaggaagggcccttccgtaacaaaacttaccttttcggaaagaaacttcaagttgaagaacaagctaccttttggtgagtattatgcccgcaaacagcttgaacgacaacaaaggggggaaaattttcctggcagagagtaatccaattgcaagggtggatcagttgcgacatcttcagcacatgaccaaatgtacaccccttgttcgtcccggctgcctggaactgggttgtcgagtacaaatgctaccaagagtgtaaccaccatgctcatagacaagagtgcatttatagaaaaacaaggtggtcattaatggggtggactgggccatctgatgcaggtgcatacggaacaaaataacttg

SEQ ID NO: 16775 - DNA, 529 bp, Gossypium hirsutum
  Clone ID: LIB3829-023-Q6-N6-G5
ccgacaggaaattccagtggcaaaggataaaacaaaaaaagtgatacaagcttcagttgaatagcataatcaacacataatcaacacagactacagacaacttacacattaggtacaattaagtaaaaccacccttgttttaacaagcaaatttgtcacttttgacagggggtcatgctacaaaagccacaccaaacaagtatacaagtaggtgacattttcatcgaactctgcatgctgcagggccacctggggaacaatttggattaggcgacctacaaatggcacctggaccaacattgtttgaaaatctgtgtcgcactcgataatctggaactccacccattgcaaacggaccagcactacctcctgttacttttgagttcaaagacgaggagacttcatctgcactaccaccagtgcattgtagaggttccagcgtttcaacaacatcactcattaacggccttgcttttggattctggctcaaacaatagtatgccaagctgcatgccttctgggcagccct

SEQ ID NO: 16776 - DNA, 532 bp, Gossypium hirsutum
  Clone ID: LIB3829-023-Q6-N6-G6
atgcaaatgcaaatattatttatatgctcatctacaaaatgatacacttctcttctgtcaatttatattatatattatatataaaagcccccaacaagcagcacaaatgagacaccagatcattgctgtgagatgaaaaaccaaaaggagctactggtggggaagaaaagggaaaatcattccttccaaaacaatcaaaatatacatgcatacatacatccggggaaggaggaaacttgtttaagacacatgaatttacaagacggtgttaatatgaagggctttgagcaaggaagttgccatttgcttcaccaacacttggcccccggatcgctgtccatcccttcgttcctctattagagtctgaagcttctgtggtaaatcattctccacgattaattgttttggccgtgggtggcgctcatacacagccttaattaatttaagtagattaagacgggcaatagcatcctgatgatccaaccttgcaatcagcagtggcgtcaaaccattaacagctaatgttgtgttt

SEQ ID NO: 16777 - DNA, 526 bp, Gossypium hirsutum
  Clone ID: LIB3829-023-Q6-N6-G7
aggtaataatggtcttcatattgtctgttaaataagcaattgcaactggctttgaagcaaaaaaaaaaaaaaaatctcagcaggaggattgaaatactaacagcactgaggtccaaaaaagaactcgaagcacataaatttatcggtaacagtcaaaaggttgattctatcttgtcgtgaagagttaccaccaaatcgtgtgcatcgtttaggagtttccatacatcgagttggcccgacatgctattgcactctgttataatgtcatctgtgctgccataattctcaatgatcaatttcctcttctgcaacaccgaagctgcaatggcataaagtaatagatcgtctgtagggggggctctttgtcttatcctactccaggcggacttcccgatcccagccctaatggctgcctgatctgcccacatcacctcccagaggcaatttgtctgttcgaatgtcaattcccttctaaacagtaccaccaccattctataaacaaaaaagcaatcctcggctttgagct

SEQ ID NO: 16778 - DNA, 529 bp, Gossypium hirsutum
  Clone ID: LIB3829-023-Q6-N6-G8
gaaagtaccttatttgatatttttatatatttcaaaattcaatttccatagttcgaatctcagtatatatgcagagagtcttctgatattaggctacagcagaaaaggacgtggaattaaagaaaactgtaactactaactatgaggagcatcaatattactggtgacagctacaacaccgatcaatgagtgggcaaatgaatagaatatagcaactgagtgattcatcaacagttgaagccatgacagacagacagtacgatgatgagaatcaaggcgatcagaatcccgagcacgatcagctttattttcatgttctgtaaccacatctttctcctcatctgggtcccctgctgcctgaaatcttgtgcctgggagcgaagattttctgatttatccaccaaaagctcaattttttcaccacggtccagaaccttctcaatgttttccatcataactcctttgacttctgaaacttgagctttcactttggcaatcttactaacctcctctggatgatcaatgcaat

SEQ ID NO: 16779 - DNA, 495 bp, Gossypium hirsutum
  Clone ID: LIB3829-023-Q6-N6-G9
ccatctcaaccactgtttacaaatttacaacttacggtacaaaagttttgttcgcatgctgtttcccacagagtccataactcctaattaattaaggttagggggggaaaaaataaaataaaaaaaaaagtcctttagcccatgcccaacaaaatttccccccagggccctaaattcttcccttttttcagaggtcattaaaaggggtcctcaaaaaaaaaacaatgtcccccccccctttttccccatagggtacattttttagttgtgggcctttttactaaccacaaccaaaaaaatttgttgacagaaaaacacaaggatcgaataaaaaaataccccaagggaaagggaaagggaaagccacctcccttcaaatttagcaggcaattacagtttttatgccgtttttaatcaaccaatgaatcaatgatgaaacaggtcatgaactccattgatcgggtatggttaaaaaatatgtagtcatcgcctttc

SEQ ID NO: 16780 - DNA, 545 bp, Gossypium hirsutum
  Clone ID: LIB3829-023-Q6-N6-H1
gcttataacttattcttggctaattattaaacgggtaacaagttaataacaattacaagtaaatttaaaaacagacgttttctgcatatttacacgaggtaaattcttcaaaacctaacaagttgaggtgcaagaagaacttgcacattagttcttaaatctgaattttctgaatgttacctatttacagataggtccaagaaattaccaacaacttgacgtaacaattctcataaaaaatggattatttaccatcttcagccatgccgatttatgagatatatgctttaaccagatctgaataactgcacaccagacctgttcttggacatgtaattttaccattgtttttctcagccatttctttcagagccttagtgctgtagacatagccattaggtaagacttgtggtgggttttcagtatccatcagctctttggttatgtagcaaacaagcttcgagtgatgctgcttggaatatggcaaaggcatggccaacttccggaagctgtcctgtgacaatgggtcctccttggtgcagtca

SEQ ID NO: 16781 - DNA, 589 bp, Gossypium hirsutum
  Clone ID: LIB3829-023-Q6-N6-H10
tcgcggctcattgagctggtttcgggctccttttcccccccttgatttcttctctttttaataaattgatttggggcttttcatcactgtgtgctgttctctccatctcatggagtggatttagtttctcacgccttttgtctgggatctcttgcttgggttttctgctagtttgggttctctcctttgctcaggctttctacaaattctgctcttcctctcttgctcgggtcgggtttttgttaccgttttgtagcctgtggtgtttggcttgtcttgggcttttggaattctggttcagtgttggtttctggaggcttgttccgggcttctcatcggttccattttctgctccaattcaggaggttcagtgggtctcgttttttgttggttggtctgagggcgccgatatttgtgtcgtggcctcgtgggtagcgcgtttttccgactcgatctcgctcgtgcactcggagctttgtgcggactctgttttggccttttgttttcgagggctcgactgagtttgtttgtacagcaagccggagtcaggaataaagaaagccgtttggtttcaaggaagtttggcagg

SEQ ID NO: 16782 - DNA, 159 bp, Gossypium hirsutum
  Clone ID: LIB3829-023-Q6-N6-H3
aatcattccactgcagacttaacttgtattatttgaacgaacgattctcatcttacactgatattacactaagacaacatatcagcaaagcgaaaagggaacatacgacatctcagacatatttataagaattgccatcctagcaagccttattttttc

SEQ ID NO: 16783 - DNA, 557 bp, Gossypium hirsutum
  Clone ID: LIB3829-023-Q6-N6-H4
agttaaactctcaaacacttggatttagagtttagaaactttacaaaaatataaatttaagacgatgcagcccatacgtcagtttaaagtttctaactgaatgccactaattggcaacaaaggaacttcctaccctactttcaatctaacgatattccatccttccatttcaataacaaagtctcgtgaagccatacttttgttgataaaacttaaccagagaaaaaaaaaaaaaaggaaacaccaaacaagaattggtacaaatgcaggttcttatcacccaacacacaaccttacaatcttgtaggaatggacattaacacatctcgagattcgacaggcaaccacctcttgctaaaactccgattatcagcctcttgactccaattccagaattatcttttttcttggtccctggagatgcaaaggagaagattcttcaagtgctgggaacacaaaaacaagtagaaaatagggaagataaagagtggggggtctgatggttgaaggaagctcttaaaagcaacaagtgaaggccacatacattatataggact

SEQ ID NO: 16784 - DNA, 414 bp, Gossypium hirsutum
  Clone ID: LIB3829-023-Q6-N6-H7
cagggaaatttattagtatcatatatataaaccactatcagggttcctaggggaactcttagtagcttagtcaaactacaaagttcccataatataacaggatggatccatcagagcatttatcagacttagtttatcaacaaaaacaaactattttttaaacccattgatctaaatggggggttcaaacagttgcaataggacccaagctaacgatggattccatggtcttaatggcttcgaacctcggctccttgtcttcgaacttcagggcggggtagaccttcatgtagtcctcgaacacaaatttcgggtacccaatgggtttctcagcttctttgtccaccaaagcaggtgctggatatataacagcatcacttccagggttgtaaaaggaagcaatggacattcggg

SEQ ID NO: 16785 - DNA, 209 bp, Gossypium hirsutum
  Clone ID: LIB3829-023-Q6-N6-H8
acgtggtagctgattatctataagcttttttccggaaattacatattgtgtgccgctatacatatagcctataaacaacccagttttggatcagtggacattacaaaaggttcaacacaccaacctcagatctaccacaatatgccattacagaatgaaaaagaaaggcttaacaaagctccaacttattttggcaagtagtatcattt

SEQ ID NO: 16786 - DNA, 532 bp, Gossypium hirsutum
  Clone ID: LIB3829-024-Q6-N6-A1
caaaaacgaagaacttgcattcaagtacaaatggaagaacataaactacaagagagtttcaagctaaacgaaattaaagatgtctgttattagaacaatagtttccaaccagaaatctgataataaaagtataatcctccgtcgagatatgtaatctacttgatcttcttctttggcctcaactgattgctgtgtccacacttctttttcctgcagttcacggcacgggggtgcagacgagcataacacttgcggcagatcatcttgtcctggttgtatttcctagccaatgccatcaaagaaggctcgataatgccaccacgaagtctcagaaccagatgcaaggttgattctttctgaatattgtagtcagcaagagtacggccatcttcgagctgctttccagcgaagatcaatctctgctggtccggtggaataccttccttgtcctggatcttggccttaacattgtcgatagtgtcgctggattcgacctctagggttatggtcttccctgttagggttttcacga

SEQ ID NO: 16787 - DNA, 535 bp, Gossypium hirsutum
  Clone ID: LIB3829-024-Q6-N6-A10
aagtcaccttaatatttatttcaattccttttattctcaactcatgtttagttgttcatacaaatgcccctgctttaaaattcacaagcaatattggttttcccctaatttcttaacatcaccaccaaaaagatcaagaagttgctaagatcaagatcaacaagctacacaagtcagaacaaaatcaacaatattgaaaatagacactaaacctcactctagtttccacaatcttttatcactctgcaatggttatgtacaactgattcacattgcaagtgatgatctttacacaatttgtgaaacatttcagagcaagattgatttattagagtatatgataagatccataaataaggtggcagtgaatatatctgcagaaaagcccttaccaaccatttccgtaagaagttgtgttgcctttgaagtatagctgttgcgaaggaacccccgaatcattacattataacagcagctattaggcaaacagtcattatctcccatgctccctaacaacctgtatgcttcatctggc

SEQ ID NO: 16788 - DNA, 562 bp, Gossypium hirsutum
  Clone ID: LIB3829-024-Q6-N6-A11
caagttcaagtttaaccaacaaacacagaatatgacaagtcagtctcaaagcattacactaacttttcaataacctcatcgtagagtatttcaagaggtctactaaacatataaatatataatcgtctcaaaattctcacccttacaaaagaaatgatggtaagtagatgaaacaaaaacagcaaatataatccatgggaattaacggtagcggcgaagagagagagtgttgtttctcttccagtttgcccttcttgaaggtcgagccttgtggtgcaagtgtcccttgccacgaagacccctatatttctttccagcagaggtgagtccgcggagttccctgtgcttgtgcactggattacagatccagttgattcgtgggtcattgcggatagcattgtgggcagtatcaaccaagatgacctcgaagtatttgtatgttgaatcctcgttgatccaatatgagtttacaaccctaaggcctccaagctttcgaccagctcgttcctctgcaactgatcgcttgctgcgctgaaatttcagctgagtgacaccctggttt

SEQ ID NO: 16789 - DNA, 532 bp, Gossypium hirsutum
  Clone ID: LIB3829-024-Q6-N6-A12
ggatgctaagctaataatgcattttattgatttggaatttagttcaaacacatctaatcgttcgatgttttgttctcagtagataagaattgttctatctattttcaccaaggctacaacgagggagaaagaggccaatattatgttcaattataccacgctctgcacagccagcctgctactactgtttgttcttttaaaagtttttggggactagtctatgattaaatctgttgccttgcctttgcttctgctgctactgccggtttctatgagataacagaccatggaatctacgtcatccccaaatatgctataagcttcatttgcctgcaaataactgaatcccattgacagtagtaattgcatgccactgctgagaacactatcctgcaaaccatgctcttttgagccctccagtttggtttcactgcctgcaggccctgtccctgttctagctccagacgatgatggttcagcagttgaagtagacgattctttatggcccacttgtggcttaaacttgtcactg

SEQ ID NO: 16790 - DNA, 543 bp, Gossypium hirsutum
  Clone ID: LIB3829-024-Q6-N6-A2
caataaaaatatcattttattttaaacaactaagtacacagtggttgccttaccatacaaatctaacaccaaggaagaatacaatctagtctagtctaccatcaatattcaagacctctcaacatcattattattattgtaactacacgttcctgaaaggagaaatgccaatgaagtctccgaatcatcggatgccggtcgagggaactcatgaaacccaccaaagttacatgtctcaaagttcaatggtgagaaataagcagcaggatcatcaaggctgcatttgacatccaccccattttcactaccaaagttgaagaaattcatgcttccgaccacatttgttgcttcactgccatctccagggtcagatggggcaatgggtcctttagtttcatccaggggaattgctggagtgtgaccctggaaaagagctatgtgaccaaacagcttatctttcctcgaaaacgtggtgccgcacgaacatagccatttatctttaccacaatgcttctcatgagttttgagatcagcaatcactga

SEQ ID NO: 16791 - DNA, 480 bp, Gossypium hirsutum
  Clone ID: LIB3829-024-Q6-N6-A3
atacgcttcaaagcttgatttagattgcatttcattttgccatcatgtataaccttatataatacaacataccctacagtatcttaaagcaacggggataataacaataacatacaacaaccgaaaaagaaatgtagcattcgactatctatctataaccggagaatggttcttagtgtgtcgcataggttttggatggtttgctgctcctgtgttgcttgcaactcttgaagcggcatctcctcgtagcacattttgtggtaagctagggcctgtgccaggttcattagcgtagaacttgaagtgagtctttggtaaacactaggaggaagtggcacctgtcaaatgttgaaaaccgtaaatcattgtgtgtgtgtgtgtgtttgagggggggggggatgcacaatgaacagggagaggaagagagatggagggagatgggaattgacctcgatttggggttcttcgacccttttttga

SEQ ID NO: 16792 - DNA, 538 bp, Gossypium hirsutum
  Clone ID: LIB3829-024-Q6-N6-A4
aaaaaaaattaatactattaatctaatgagattatcatacaaaatggaaactaaaagaaaccaaaatatgaaacatggagtacatgttttttttatgactaaggttcttccaccgcccagtgccccatacaacatgtttttacaatgtacccaaaagaaccccttttgccttagctggtctactagtgacggtggtgctcacactctacaggcttgacagggaacctagcagtatcagtacaatagtcatagaccaagtggtttgccctaacccacaccagttggtggctctggtgcaaacttaactccgacattgtcggctcgtcccaccagaacctcttctcagcactgctgctgcatttcttggcgatctcatctactgtcacggaaaccgggcactcgcatgcgtcgatttcgaagcctttgtaggaggcaacaaatggtgcatggctccaatcagtcttgactaggccaccctgtgtggcccaatcatcagcattccagattgagctataaacacccatggcttggtctttgg

SEQ ID NO: 16793 - DNA, 568 bp, Gossypium hirsutum
  Clone ID: LIB3829-024-Q6-N6-A5
ggtaagaatatatggcatgtatatgccaaatgaaggaattaatcactcaaataagtagacaatagtacatatattttattttgaggatgaaatttatacaagtgatgtagaaatagaagctaggaagaagagatgcttgctagagaatatggaaagataaatatataaacaaaaattttacagctagagatgattataaaagaatggaaaattgcaggaactgaattattctatagtgaaaatgggggggaaagaagaaaagcttatctaaaagagcgttggatttcttcgagtgttctgcccttagtctcagggacccaaagactcacgaatagaatagtgaaagcgcttacaagcatgtaaatggtgaaggttcctccactgttccaatccaaaagcaggttggcagtcatggtaaccagccaggcagagaaccaattggaaagtgttgctatgcttcccgctagaccctttatatttactggaaggatctctgacattataacccaaggaatgggccccattcccagagagaaagttatcaccaaggtcacaactccaactaccg

SEQ ID NO: 16794 - DNA, 538 bp, Gossypium hirsutum
  unsure (1)..(538): unsure at all n locations; Clone ID: LIB3829-024-Q6-N6-A7
actattaatctaatgtgattctcatacaaaatggaaactaaaagaaaccaaaatatgaaacatgagtacatgttttttttttatgactaaggttcttccactgcccagtgccccatacaacatatttttacaatgtacccaaaagaaccccttttgccttagctggtctactagtgacgatggtgctcacactctacaggcttgatagggaacctagcagtatcagtacaatagtcatagaccaagtggtttgccctaacccacaccagttggtggctctggtgcaaacttaactccgacattgtcggctcgtcccaccagaacctcttctcagcactgctgctgcatttcttggcgatctcatctgctgtcacggaaaccgggcactcgcatgcgtcgatttcgaagcctttgtaggaggcaacaaatggtgcatggctccaatcagtcttgactaggccaccctgtgtggcccaatcatcagcattccagattgagctatatacacccatggctttggtctttggngaaaaggaat

SEQ ID NO: 16795 - DNA, 406 bp, Gossypium hirsutum
  Clone ID: LIB3829-024-Q6-N6-A8
aaaaaaaaaggggttttttaaggaaaaaaaaacccccaatttgggggggggcttttcaaaaaaaaaaaaaatttccccaaaaatgggaaaaaaaaagaaggggaaaatttaaaaaaaaaaaaaccccccggatccgaaaaaaaaggggggggggggaaacccaaggaccccgagggaaaaccctgaagggggggggggtttcccccaaaaaaaaaaaaaaaaaaggggaaaaaaaaaagggtattaaaagcggccccccccaaattatttttgggttaaaaaaaaggggggggtttttttttcccaaggggttttttttaaagggggggttttttttggggtttaaactttaaattagaaaaggggggaaccaaaaaaaaaaatttttgaaaaaagcggttttaaa

SEQ ID NO: 16796 - DNA, 503 bp, Gossypium hirsutum
  Clone ID: LIB3829-024-Q6-N6-A9
gaagaaaaaaaaagccaaatttttttatttatcagaattaaatcaacttaattgagtttcacaatatgaaacagccagggaaacatatcagcactacctttaccaattaacatcaacaaacaccaccaagtgttaacaactattacatatatagatccataccatacccaaaattaacgaatttagaatccccatgcctttggttagatagataaaaagaacatcagccaaaagcagaatcagaggatggagatgggtgcaggggatgggtggttgttgatgaaaaggttgttacccttggagagctggtccatgagggtaagtatgtgggagttgtaagcacgggcctgattaacggactctgcttccagctcgcccagctgaaaacagagcctttcctccgccttttccgccaccctcagcctttcccacatttttcgaaattcctttctcatctgctcctctttttccctactctccttcaattccttctctaactcctg

SEQ ID NO: 16797 - DNA, 358 bp, Gossypium hirsutum
  Clone ID: LIB3829-024-Q6-N6-B1
ttttttttttttttttttttttttttttttttttttttttatttaaaatattttatttttttttttttttttaagggcgtaaacaaaattataaaaaggggaaattcctaaactaggagaaacaaaaaaaaaagaaaaggaaaagacaaaaaaaccagaaaagaaaaaaaaaaaaaggggggaaattaaaaaaaaaaaaggaggggaaaaaatacacaaaaaagggcggaaagggtttcggaaaaaacgagggaattatcatatttaaaaaaaaagaacacggggggcaaaaaaacgcctgttaaaaaagggccaaaaaaatttaaaaaaagggggaaaaaaaagaagggaccatggg

SEQ ID NO: 16798 - DNA, 406 bp, Gossypium hirsutum
  Clone ID: LIB3829-024-Q6-N6-B10
aaaaaaaaaaaaaccaaaattttaaatttaaaaaaattaaaaaaaaaaaaaaaaatttaaaaaaaaaaaaaataaaaagggggggggggaaaccctttttgggaaaaaaaaatttttaaaaacccccccccccctaaaaaaataattttcccggggaaaaaaaaaaaaaaaaaagggggggaaaaaggggggcccccaaaaaaaaaaaaaaaaacccccttaaaaaaggccccccggggggaaaaaatggggaaaaggtaaaaagcccccctggaaaaaaccccccccccttttaaaaaagccaaaacccgggcgggggaaaaaaccctttcaaaatggtaaaaaaaaatttttaattttggggggaaaaaaaaccccccccccttttttaaggaaaaaataaaac

SEQ ID NO: 16799 - DNA, 556 bp, Gossypium hirsutum
  Clone ID: LIB3829-024-Q6-N6-B11
aaaacaacacaaacattcatttccattgccaagtcatcaattaacctaatagtaataatatacacaagtcatttactccactttgcttgcaaactaatccttagatattccactttaaattcctcacacaagaataacagggatttgatttcacagttctcagatgtacacacaaccaaatatgtttctctcaaccattgataaatgtacaaagatcaggcaaatcaatgttacagagtcttctcaccaggcagatacgacggagatccaccctcaatttggttctttcttcgattgaagataccgctgatattaggtaaaagcacctttttcgagacagaagacttctctttttccaacattttagcctgcacaattttctctggtgggttctgcttttgaattctgtagtgctggggggatgattctgttgacatctgtgcttctatcagaatccgagatgcagctgcaactgctttcttctgttccttttcacgccacttccggagctctccctccacagccctctttgcagcttcagccatctctgccctct

SEQ ID NO: 16800 - DNA, 551 bp, Gossypium hirsutum
  Clone ID: LIB3829-024-Q6-N6-B2
ggagaatgaactgctacttttatatatttaagtcaagaagtgtctatacatacgggccgttgtatgaaaacagtacaacatcatatgttatctgctctgctcctatcattaaggtgtaaagccctaaagactaactgaattatacaaattgaatttgcagaaacaaaaggtagggtgtttctagatcctctacttattcatgcaataccttctttggctcttccgggaagtcgaatgcagttttcttttcttgtttcttcggggtgatttttgccagatgtcgcttcacagaattctggtttatttcaaagacaaaagccatgtccctaatctcaatcaaactgcttgaaacaagacccatcagctgtccggtagaaacttccttcccatttaagaatatcgaactcttgcccagattcttcaaagagaaggaaccatctccctccatttttataattgcctgtcgtctagatattttgttagcccgcccttctcttcctaagtcaatatcaacatcaacatccatggttgccctgccaagtacaacctca

SEQ ID NO: 16801 - DNA, 85 bp, Gossypium hirsutum
  Clone ID: LIB3829-024-Q6-N6-B3
gaagaacacacaggttacaaaacaagacgatatacaaacccaattggttgactaatatcagaccaagattttattgcttattcgg

SEQ ID NO: 16802 - DNA, 526 bp, Gossypium hirsutum
  Clone ID: LIB3829-024-Q6-N6-B4
gcaaagtaacttattattgccataaatttaatataagttgatacatgaactgaataggcgttaagcttcccgcccacaccatcaaaggcttctagtctttaacaataaacacacaaattcataggattctaaaaaaggaaaaaagaagaagataaaactgcaagccaagtggagcacgaccaattacttaaaaggcatgtttgtttaactttaagcagcaacactatggagcacaacagtctcaacagtgaggccaggtccaaacccaaagagcactccccactccaatccttctcctgtggtctgaagcccatcttcccttgatttcttcctcatctcatccaaaataaatagaacacaagcacttgacatgttaccatactctgaaagaacgtgccttgtggctagtagcttctctggcttcagtgctaatttggcttctacttgatctaatattgctggaccaccaggatgagcaatccaaaaaaaggagttccaatcgggtatgcccaatggttgaaatgct

SEQ ID NO: 16803 - DNA, 521 bp, Gossypium hirsutum
  Clone ID: LIB3829-024-Q6-N6-B7
caaacatatcgactgattatatattaatacaaacagtttctctaaaatggtacggtaaaagatgttgcaagtgtagctgcctaatgctttttcttctggctctttcccagtctttgacaatctatggttaaaggggagctttcgtaagtcaaaaaatatggaaaagctcgcccaagttgagatgattcgatcaaaagcataccaaatggtacattcgcttctccattaatctgatcttggtctattcgagccacttttatgactattatacataggtaaaagccatcgcgacttgtgtttccgtctgccataacaccgccaataaagcatccaaagagctactgtacaaccaatgggaatggcccatctgtccaaatcaaggatgggattgtagacaatagtttcccaagtggatacaataaaatgccacacagggttgtagtaaagagactccgatgaccagaacatcctcgtatatgtctctaagaaagaaaatagtacccaagctgccatttcaatca

SEQ ID NO: 16804 - DNA, 519 bp, Gossypium hirsutum
  unsure (1)..(519): unsure at all n locations; Clone ID: LIB3829-024-Q6-N6-C1
gtccaaactaaactattctataatagtaatgtaaaaaagcactgtaaacattaatatttagatacaaaactacaggtaatatggtttactgcaatggcattactgattctaactaagctactgttgccctgttttaacaggctcacggtttcgtgtataagttgtacatggcaatggcaaatgaccaaaagggagaccgagaatacttgtttcatctgtatatcaaagaaagaatcatgccatcaatttgatgccccgagatcgtgatcatctctggatattggcatcatgtcaactttcaatcgaatgttttatctgcagggcagctcgaacaacgtttccccttgtaatgatcccgactagtttgccatcaatatctaccacgggtagtcggcgatatttggtctcgagcaatagcctagcagcatcttccaggttntgttgtttcacgaacaacgagcggtgaaagtgtcatcaagtctccgaccacgtttccgttatttttggtcatcaatttct

SEQ ID NO: 16805 - DNA, 549 bp, Gossypium hirsutum
  Clone ID: LIB3829-024-Q6-N6-C10
ggacaaagctcaaaaactgttccattttctcattcctaaattaaaaatcagtatacatacattttctaattacatataagtgaaagattacagtataaatttaaaccatttaatgtgtaacataaaaagagtgaactacttgtacaacttgtttaacactgtctgcttaaacagagaccggggtgggtactgaaggagggacctgattttcggccgggatttcaacaaactccgaaaggattgccctgaattcatcaccactcatcgtttccttctcaaggaggacttcgacgatcttgtcaatggcttcacggttgttccttatgtgttgcaacgcaatctcataagcactgtctgatatcctcttgacggcagtatcgatgtcttcggcgagtttttctgacattgagtttcttgccatcattctcattatgacgtcggcgctttgggctgatgagtccataagggaccatggaccaatttcagacattccgaatgtcaccaccatctgtttagccaaaccagtaatctgctgcaaatcaccagctg

SEQ ID NO: 16806 - DNA, 547 bp, Gossypium hirsutum
  Clone ID: LIB3829-024-Q6-N6-C11
gatagaatcaccattttattgttaaaaaatgatgttactaacaacaaataattccatatacaaaagcttagaaggataaaaaaggagtgtatgtgtcgaaaaatgttcgaatctttcatcaaaagcattgaagttccctgagtcttatgacttccatggtttcatcggatatgctccgataacttgccggaaaaaagaaaatcagtgctccgatttatgcccaaatccgtttacgaggcgcaagatccgatgtttttatttcatctatcttggcagctacaatgaaatcattcatgctcaaccctccaatcgaagcagtccacagttcagctcggacttgattcggtccttccaaatggaggctcgggaaatgatcggtagcttccgtaaccttataaatccgattgatgagttcaactccggatttgaaatctcgtaatttccataaacactgcagtttaagtccaccttcttcatctaacagcctccatccaacaaccttctttattagagccttagcttcatccaccgacaagggaagctgtaa

SEQ ID NO: 16807 - DNA, 548 bp, Gossypium hirsutum
  Clone ID: LIB3829-024-Q6-N6-C12
gacataaaattcatgacaaccgtagattcatgtatcgaaacattattcagttcaaacatcacattctaagtttaccaactgtacctgctacgcaataattgcttgtttcaagatgccaaatgggattaataactgcaaatgagacataaactctttaagagcttagtttcctaccttgtaacttcaaactcccttgtcatcatgccttgagtgccgcaatgcattcaatttcaatcttggcatccaatggcaatgcagctacctgatatgttgaacgagccggtgctggtgaaggaaagtatttagcatagatctcatttactttcttgaagtctttcaagtcagctagcataattgtcgtcttaaccacagaggaatagtcagcaccactagctttcagtatttctcccatatttttcagtacctgctcggtctgatcctctacactgtctgagatgaactttccagtctctggaataaggccgagaacaccagagacaaagagaagattattggccttgatggcctgagaatatggtcccaatgct

SEQ ID NO: 16808 - DNA, 528 bp, Gossypium hirsutum
  Clone ID: LIB3829-024-Q6-N6-C2
aataaaacccatccttgatttttatttataatataaaagaaaacccttaattcagtaaaacgaaaaatatcactattccaaaatatatcatttatgagtgagttctgacacacactagcatgactgaacggagcgcattttagcaaaactgagcgccgccgtggctgctcatgttagcagcggaaggaatctcaaaatgccagagtctaccgacacttttaaccaagtattttctacataaaaactcctcggcgaagaccttttccaccctccgatccacgtcgtgcaagaacacgtgcgttacgccggaccctttcctgttcctcgccatgaccgccgccgagaatattgcagccatccttcctggtgcctccgggaaatatccgcgcggcgcgtcgatcatcattaaatcccactccgtatcgtagaactcatcggggaaagcccctcaaggcaagcttgcacttgtcgttgcctcgtaagtaagctttggagggaaaacagctgggttcggagcggtaatgggag

SEQ ID NO: 16809 - DNA, 548 bp, Gossypium hirsutum
  Clone ID: LIB3829-024-Q6-N6-C4
aaaccataaaaatatgaatatttgcctatttggtacgtaaagttgatcaaccaacccccctttgaaatattttttgggattctctggtttcttcatttcccatgaccatgagctaggagccattttttcagcccaatcccttttacaacaataggattgcttgtttatgaacaaaaataaataaataaaaacgcctccaataaagtggtctggcctagcttgacatggtgacctgatcgattgactgaagtccttggactgcaaaataacggacatcaacatctgggtcctcactcagctctaccaagcatggacgtatcgtcttctccaccacagactgatcaactactgaaatcagagactgcaaaaccttcgcaacattaaacttaatattgggaaccctgtcttttgatgcattgacaacaactggcaacagtttagaacatgttatttcttgagcccaaaacaggaccaaggagagaaatagcacgaagaagggtcatccgatgaagatagtgtgaatcattagctatctctagtacctgtgg

SEQ ID NO: 16810 - DNA, 453 bp, Gossypium hirsutum
  Clone ID: LIB3829-024-Q6-N6-C5
ctgcaaattaaaacatataatattcccactcaaaagaggaaaataaatatatatgtgtaaccttgcattgaactggcatatcccaaattaagcctttgcaggttaaataaacttgttcttaccgttgaacaaagggtagcaatatgtatatatatatatgtatttcagtatttatatatgccacctctaaactactttatctactgccattttcatcatttgatgagagctctaatgaaccccaccaacaaactgatcgattttgaccttttttttccttcttttgctttgctatccggccaaatcatgaagcaattgggcccccatcaagttcctgtaaggaaaaagttgcccctcgttgtctaaaagtgagtactgaactggctgacaatcttctatggggtctctacggtaaaaaaagaattttgtgttgcaggcaaaaaaattaaactc

SEQ ID NO: 16811 - DNA, 545 bp, Gossypium hirsutum
  Clone ID: LIB3829-024-Q6-N6-C6
gaaaactaaaccttgattcacaagttgatattgtattacatatacacaacagttcacacaaacacaaatttgatattccctcaatacagttcacaacataacctgctatcttacaaatctttcagcttatacttatcttctctttagtgttttcatgagaagtagtagcctcccccgtatgatgagaaattaaggtaagttactttgagttgaggcatagttgttgacgagagccagggcattgcttgtcaaatgtgcaattttaacaatccttttccttaccatagtctttacatttccattcatggactttcctgcaaatccatccatgcaagtatcttcatctgtcagcgctgtactaacccaagtttgaatatcactcattgtaagcgcaaaatttgagcggctaacgtgaccaagttcctctatagactgttgaagctcatcaacagagtcaccgatcacctcaatgcaatctgccatggcagcagctaccctaggcctcaaaccgtggattctagagatcttcaccatcaaccttgaag

SEQ ID NO: 16812 - DNA, 542 bp, Gossypium hirsutum
  Clone ID: LIB3829-024-Q6-N6-C7
aataaaacacaaaatccagcaaattatctataatgctgttcctaatacatttccaaaattactccttgatgcacaaagtaatggagatgttgaagaagagcatgaatcctaaatgacaaaacataaagcagatgcagataatcatgaagttaatggccataaatgtgccaaagcagagttgccttaaacaaccgtgcttcacgaatccctccctgttaatgaaaattcacacgagagctggactctcaggaagctagaatctgcacaagtgattcgtcacctttggactgcaaactgtcaaacaagatcaagctgctgcctcttcaaatgcttttttcgaacatcttcaaggaatctctcaggaaactccagatattcaatacaatccttctttacaaccgctgcaagctcttctttccccacattctcaaggtttcttatcaaaattgtaaaggtcaacttatctggagaacagccacatgcctttagtctctcatatgtctccatcgccttctccatcataccaacttgcaaatatgctc

SEQ ID NO: 16813 - DNA, 537 bp, Gossypium hirsutum
  unsure (1)..(537): unsure at all n locations; Clone ID: LIB3829-024-Q6-N6-C8
aaagaacattcaactcatcactccacactaattccgacatttactattaccaataaaacaaccaatatttgtcngaaaaagctaaattcttactaattaaacgacctagattactttaaaacacaaaactgaatcagaactaagtgttcagtgctggacaatccagtgagaatgaaaactgtaaacatgcagaagggcaacttcaccatacaatcttccagtagaattcaaaattcatggtcatagttaaacaccaaccacattggtttctaaaattaaaatttaaaaaaaaaattcccacgtagcggatataccaacacgaaaattgattaacacagccttcggcaacagctctcttaaaatttctcagatggcaaccgcaatccttccagctacttggtccagatcacgctgaccgtttgatgtgattctccttccacctttaggatcaatatcaatgatgttcacattctgcaattgctgaagaatgtgacgggcaacagatccactactcttgcagaaatggcgtgggcgact

SEQ ID NO: 16814 - DNA, 473 bp, Gossypium hirsutum
  Clone ID: LIB3829-024-Q6-N6-C9
gggatatcaaaaacattttaaatacaaagctcaattggacaaaaaaacaaattttggggccgaaaaaaaaagaaagtaaatgaaaggccaaaaggggttcaagcaaaaacaaaagaggggaaaacgggtacattaaacaagggaaaaaaacgggcattggaccggccatccggactaaaaaatttccacatccggggacaaattggcaagggaccccaggcccgaaaattggaaatctcaaaacaaaaaaaaaccggggggtttttaaactaaaacataaggggccaaaaaaataaatttttttaaaaggagaaaaagggtactttcccttacctgaaactattcccggctaatttttggaggggaaaaaccgggacaaaaaccttgaaccggctgagttcctggaaaaaacttttgaaaaacaaaataggggagggcagggactacatcggctaaaagggggcgcaaattcg

SEQ ID NO: 16815 - DNA, 543 bp, Gossypium hirsutum
  Clone ID: LIB3829-024-Q6-N6-D1
cagcacaaacaacaaactaggcatttagaaagttcaaccacaaaagtatatgaatgttcctccggaaaagaagtaaacccgagtcgaaaatcgatcgtaccttactacaaaagactatttaatcaaaaacacgaactgcggcaaaaggtctattaattcctctatgtcatcctctgtgcagcttcctttgcaagaagcttctccttcgctttggttcgggcttgtgacttggagcccatgatgccgccaccccacttcttcctgtactcgtcgtacttgtcattgaagtttgccttgattgcctcgagtactttgctgaattccagcttatcctcgttcttaaccgtggtcaaacacaagacggaagcagttttcttgtggacaatcgatcccaaacgtgattttcccttaacaatgcaatatgggacctccattttcctgcacaaagccggaagccacactaccaactctatgggatccacatcatgagcaataacaaccaattgagccttgttctgctcgataaggtaagtaacatggtta

SEQ ID NO: 16816 - DNA, 557 bp, Gossypium hirsutum
  Clone ID: LIB3829-024-Q6-N6-D10
cctaaaatataatcataataattatccaatatgacgatagtttctaatcataaggaccttcccgaagtcttttctaatccataaatcactcattttactagtaagaataataagaaccaaaaccacaagccaaacatctctcccccaaaattaaacatgcacattagagcatgtaaacccgatctcatttgccaccatgcttggccttcttgtgagactctaaaccgccctcagacccgaacgacttgttacaagaaccacaagagaattgaccaccagactttggagactttgcagaatttttcccagattgctttgctggatgcggtgttgctgtgtgtccacccttcttaccatctgtcttctgaggtgtaactgcagatttagccttttttgcagaagcaggggttgcagcttcagcaggtctcttcttgcttgactcgaccttcttaggtgtctcctcatcctcgtcatctgaactttcatccatagacatctcatcagactcgtcatcgtcatcagaatcatcttcctcatcagaaacactctcatcctcg

SEQ ID NO: 16817 - DNA, 547 bp, Gossypium hirsutum
  Clone ID: LIB3829-024-Q6-N6-D11
aaataactaacaaaactatatgcatatattgaatttcactggttaaatactgatcttcaaactccatagctatgcatacaataaacaatggcttccatcttcgagaaactacacgagcaataatacgtacacagagatttgtcaattagaaaaggttgtaagtccttgaatttgtaatgccgtgttcatatatatgcaagtgagctccggtcgtggtcgggttgagggcgaccacgagttggtgttggtggtctttggatgtttagttcttgcatccatgtgtcgtctccaacacgctccggcgatgtttctggagactgaatgggaggtggtaagggatgtattaacttcgggacgataaccagtcctctaccaacgactaatatggctccagcattgtttgcagtaccacaatagtttgttgcagaaaaaagagtaattaattgaccctgagcgaatcgttcgaacccgtccattacacattcgtgtgcccttataataagttgtagcttgtttttcttacagaagtccgtcacacgatccggcc

SEQ ID NO: 16818 - DNA, 375 bp, Gossypium hirsutum
  Clone ID: LIB3829-024-Q6-N6-D2
gggggaaaaaggcaaatccccttcaaaggaaaaacaaacccaggggcccccgggaaaaaaaaaaaaaaaaatttgaaagggccggaaaagggcccaaaacggcccgaaaaacgggaaaacccaaattgggggggcccctagggggtaaaccccaacaggggaaccaaaaccagggggaaaaggggccccctttggaaagaaaaccccttggaaaacaccctattgaggaccaaggggaacggttcccccttaagggaccttttaaaaaaaaaaaacccaacgggggggaagcggggaaaaaccggtccaaaagggcgcccaaaagaatttgcccccagccaaaagggttaaaaaaccaaccccccacccataaaa

SEQ ID NO: 16819 - DNA, 553 bp, Gossypium hirsutum
  Clone ID: LIB3829-024-Q6-N6-D4
gtcctcaattacttttttttcttaattgttgaaaaaaaaaaattcagtctcgagacaatccatccactgaatccattaaaatgtaagatcaaaacaagttgcagagacgtacaacataacattacacaactttttgttagcccggtcattcctgatcaagaccaccactacaattggaatttggaacttcatcttgcaataaaactgctgccctgataatttcggttccaaacattacaaccgcaagatttatactttacgaacgataatatgcctttctcgttgatattcaacttcacctctctggtgcatgattagaatggctctccttacgattgactcattcatccccattctagtaagatcatcaatcagccttctttctgatatgcgatttccgattcccagtcttctctttatctggttctccgcttgcttaatctcattggccatatcaggagtgatattaatatgttggtttattccagaacgtgctgcatccatggtggaaactttgaaaagtctcaatgcttcagctacatcaccttcagtg

SEQ ID NO: 16820 - DNA, 553 bp, Gossypium hirsutum
  Clone ID: LIB3829-024-Q6-N6-D5
agacataagttcagtgttgttattgacagcacagcataaccaaagacaagctagtagatttgaagtaacaaactagggatagcgtaagaaatgttaacaaacaaaacatttgttgtgatcaaaaccacaaatgataacagaggtcttgattattgatctaaacttccaacacaaacgccttatctttctgcagcttctccaatgctccagcttccaaggcgatctccacgtcaatgctccgcccaccactcttcccttgatacaaatacaccatcccatcaaacctgttgttggatccgctcctcaccccttccggttttccccacccgaaatccacatcgtataccttgaacctgggagagctccccaccgccacgcagttcacaccagcatccttgtactcgaatatcttcggcgctgcttcccactccttgtttcgttcttcgatggccttcgcgttgtgcgcttctatagctttttgtaccaacgatgcaccgaattgcggtggattagccaacaataacccggctgccgtgacggtgaagatggcatg

SEQ ID NO: 16821 - DNA, 521 bp, Gossypium hirsutum
  Clone ID: LIB3829-024-Q6-N6-D7
aagctcacaaaaagcaataggttgtataccataaacaaataggtcaagttccaacgctaaatctttccatacactttaccagttaccaaagcagatagcactctagaagaaatggtctaagcaaacaaccatatccagaatggtattttcaaataatttttgttaaacaatcatacattccattccttaccgtctgccaccgatcattgctgagcgcattgcactctttgggcaccaccatgcatgtcatcatcttcctcataagcctcttgagctgcttgcgcctgcttcctacgcatcttttcctcaatgttgacatcatatagagttgtttcctcacactcatccagctccatgtttgtcagctggactgaggccctcgaaggtagcacaacctcgagtgccttgcactgctcgggggccaaggagtcaggaaaatcaacggtaaagtgaatgtatagtttacccctcatgaatggcctttgatacataggcatcccttcatcatttatggccttgca

SEQ ID NO: 16822 - DNA, 355 bp, Gossypium hirsutum
  Clone ID: LIB3829-024-Q6-N6-D8
aaaaaaacccaatgggctttttaaaaaaaaaaaaaaaaaaaatggggtccttggaaaaaaccattaaaaaaggccgacccggggggaaaaaaaaaaaaggggaacaaactagccctttggaaaaaaaggggaaacccaccccctaaaaaaaaaaaaaagtttggggggaaaaaaaaaaagtggcccctaaaaaagaaaagggggggaattggcccctaaaaacccttcttttaagggatttaaaaaaaagggggggggggggggaaacaaggttcaaaggaaatggagaaaaaaatatccaaggggaaaaaaccccttgggggaaaaaccttccctaaaaggaaaaccccaaggg

SEQ ID NO: 16823 - DNA, 561 bp, Gossypium hirsutum
  Clone ID: LIB3829-024-Q6-N6-D9
tcgccggccgcgtgggtttttttttttttttttttttttttttttttttttttttaggaatcgaaaggcatttatttaagccttgcatatcatgggaaagctaacttcgaatacaatcccctttaaacaacagtacacacactacaataccaaaattaaatactaaacctgaaactggtttatgcattccccccatctgccaataaaacttggctttaaagcaactacaagacctttacttcttcattctttgccatcggctgcacgaagtgagcccagctggactggtgcttgagttcccacgaccttggatgacccatagacagataggtctatgccttgagccttctctttctcaatttgttccttgatccaaaagtatgtaattctcagcccatccttcaacctcattgtaggagcccaaccaagtttttctttgatcaacgtattgtctgaattacgaccacggacaccctctgggccaggaatatgatggattggaagatttttatcctcaaagctaagaacaatttctgccatctcattcatgctgaccatctc

SEQ ID NO: 16824 - DNA, 539 bp, Gossypium hirsutum
  Clone ID: LIB3829-024-Q6-N6-E1
agggacaaaagaattccattagaattgtagttcaaactaggcttatcaggcaactcaactacttgaaaaaagatacatatacgataacatcttgacatcgaatggtacttttcattcgccaagatatcaaaacggtcatgtctacttctggcgagataaactaaactacggcaatcgatcatgtagctagatagaatctttcacttttcttcatgtacatgaaaaaaattgtagggtgaaagaagggtagtaccgattgatgttgagactggattaagttacacagcaagtcatgcagttacaactcattgctcagccggcgaaggccagaataaacagctttccggaaaagaggatgggcatcttcagtgaatacctctgcatccagtttctcgatgtgaggccatatctcagatgcatattgccttgagaaagccttgacatagccggagagttgataaacaccactgttctttttcccttacattgtaaccatttagtcgtcttaccgccatttgattgacttttcttttggtctt

SEQ ID NO: 16825 - DNA, 484 bp, Gossypium hirsutum
  Clone ID: LIB3829-024-Q6-N6-E10
gagagagaagactcagatgcccttaatatttatctgacatatcaggaatgacacactcaaaaaaaaaacatatacatatacgtatatatatacaagtaataatgcacaaaaaatcaaacaaacttttgaacaacaaaacaatcgaacaaatcaaaaggcttttcagttttgttcaatgcactgagttaagcacccaactggaaataatcttttgcttttcctcctgagacccatacagaccctaagcaaaattatttaaaaaaccctcgggatactgataattaacagtaaacatttaaagacgattttaacataaaaaagaaaaaccaataacacgacatgaaacacaaacccccgggttaccgttagggggggaataaatcatccaggtgtaggaaagcttacctagctagggactaaaaacagctttgggccaccctaaattaaaacaggcagctagctcgcctacttcttttatcgaaat

SEQ ID NO: 16826 - DNA, 547 bp, Gossypium hirsutum
  Clone ID: LIB3829-024-Q6-N6-E11
gaaacaaaatttatttttattttcagattcagcaaaagtgtattaaagaacctcagactgcatcaattacaatcctaaaatcaagttctgcccctatgctcataaagcccaaaggcttacaaataaaaattgaaaaaaaaaaaaaatggccccagttctggtgttagaattcacaaccctgaaaggccaaaatcaatctaataactagtttccataatgaacatagatgtttgtaggataagactatagatagcagtaagaaagatcaattagagtaggagccgaagttaaatcagattagcgaacatgctacattctcctttgacaacatgaaatcacatgtcgaatatatggaagcagcagctgccctgacagccaattccctgtcaaagcggtccccactccctgatctgatattatttgccgatgctccttgttgcggtaaactgtaaagcacattccagtgcatatgttgcaagccctggtcacaatgcagttgcatcccttttatttggttggaccagatttcaagctgtttctcttcttc

SEQ ID NO: 16827 - DNA, 546 bp, Gossypium hirsutum
  unsure (1)..(546): unsure at all n locations; Clone ID: LIB3829-024-Q6-N6-E12
aagtagagaaaccataatcacaacatatgcattaaagtagagaaacaactgcaatgaaacttgaaacattcaagtacttgggtaataaaactgaaacaacccttcttcacacaaaaatatgctccgtacaattcgtttattctctcataacatctcttctaaattaaaattgctaaagcttggatacacaaagcacaatcactcactcacttaagccttagacatgtgtcggatcaagtcgataacacgggaactgtaaccccattcgttgtcataccaagtcacaagcttaacaaagttgtcattcaaagcaattccagccttggcatcaaaaatgcttgacctgttgtctccgatgaagtcagttgagactaaatcttcgtccacataaccaagaattcccttcaagttgccttcagattccgccttgatagcagccttaatttcatcatatgtagccttcttctcaagtctcacagtgaggtcaaccacagagacatcaacagtggngaacacggnaaagccattccagtcagcttgccattc

SEQ ID NO: 16828 - DNA, 553 bp, Gossypium hirsutum
  Clone ID: LIB3829-024-Q6-N6-E2
atccaaaatgcagcatcttatttcgagtgcctgtagtctcgtatggtctgtcaagtctgttaaaaaaagttcaaaacagatgctaatatgctttacaattacagtatcgatcgcaacaaaataaatactactagctactgtacatggatctgacaggggatttcagctccagcctgttggataagacttatccaaagcttcccgtgtcatttaaaaaggagatatctatcatcaaaggaaacaaaaggatgaaaagaataaaataaactaaggctatgccaagtaattgtatatttgtgggttgttcttgtcccgctccaggtactccctgtcaatgagagattcgatccttttcttcaaatcagccggttttatgggaaacttgagctgttggaagagttcagttatcagaagagtgtgactcaacaccttcctggtcttcattatccgaacaatagcagcatcaacctgatattgacggtcttgaaatactctttcagtagtgcttgtgttctcctccactgtctctttcatctggatagcatttaccttt

SEQ ID NO: 16829 - DNA, 531 bp, Gossypium hirsutum
  Clone ID: LIB3829-024-Q6-N6-E3
gacaaacgccacacggttttgccttcatttgtagagcatgaagttattcgaatattatcacaatagcacaacagtcaaacaccataatcattggggaagcgtcaaagcgcttcacttgagcagccccttagacttcaaatattccacggtttggtcgtagatttcctcgatcccatacttaaagctgaatccttcgctaataagcttctctgaggaaatgatcaacttgggtttggaggggaaatctccaaaatcggtagggactttgaagtcagggtatcttttgttgaggaactttgctagttctggcacactggtattgacagcactgcatatatatcgacccgatgcagattctttttcagccagaaaaacatgggctcggcattcgtcttccacatgtgtgatagagatcgaacctgacagcatctgcattcctttcaaagcatttatgaggaattcattgcctgaaatcaaagatgtagcaaggcctatgctgctggggacaattggggtaagggaaggaccagt

SEQ ID NO: 16830 - DNA, 469 bp, Gossypium hirsutum
  Clone ID: LIB3829-024-Q6-N6-E4
ttttttttttttttttttttttttttttttttttttttttttttttttttttttttttttttttttttttttttttttttttttttttttttttttttttttttttttttttttttttttttttttttttttttttttttttttttttttttttttttttttttttttaaaaaaaaaaattaaaaatataaaaaaaaaaaaaaaaaaaaaaaattttaataaaaaaaaaaaaaaaaaaaaaaaaaaaaaatttaaaaaaaaaaaaaaaaaaaaaaaaataaaaaaaaaaaaataaaaaaaaaaaataaaaaaaataaaaaaaaaaaaatattaaaaaaaaaaaattcccccagaaaaaaaaaataaggggggggcccccccccccggaaaaaaaaaaaaaccaaaaaacccaaaggggggggaaaaaaaagggggtttttaataatacccgagggggggggggacacag

SEQ ID NO: 16831 - DNA, 540 bp, Gossypium hirsutum
  Clone ID: LIB3829-024-Q6-N6-E5
gcccaaacatatcacatagaataaataaattggtcagaaattatgtccagtatacataagatcctatcatagtttgaactataaattctagttaacacttatgtcacattgaaatccagacatacatctcaaaggccagctgacactaatccatgcaatgtgataatgccaatcaagacattttgatgatcaataacaggcagaaattgtacaggagaaggtggtgattccatcttttgcatggcttccactgccattgcatccggaccaatggttctcggttctctgttgcacatgtctccaactctgagcttgaatattgcttctccactggccttaataagagtacgccgcaaatcaccgtctgtaaatgtcccaagcaagtgatattcatcatctataaccagcaagcatccgcatcctttgctactcagctccaccagttgctccattatcaaatcgccttccttgcaaattggaagctcatctttcttcttcatcacatcttttaccttgaaaataaggcttttcccaatcctc

SEQ ID NO: 16832 - DNA, 507 bp, Gossypium hirsutum
  Clone ID: LIB3829-024-Q6-N6-E6
gctgcataacatacatcccacaagataagagacccaaaatactgcactcgactttcatatttggggacatcacgggctcatgctttctagaaccaagatccgcccctatccttagatgggaattagcgtcccacacaaattcagtgacctaaccagaatccgacatgttgccttgcacattggaatcaaactacccgttggtctatcgctttgactaacgctgcaggccaccgagatgatataacccaatctgaaattactcgcaaaacaaacctgataactatcctgagggagcacaatttgttttttgtgactggacaacaacccttaacttctgataaacatcagagcaaacaccgcaaaatagacctacataccccggaatatgttatgctgcccgattttaaggcttaccaaagatttttctctcacttgaacgcaatgcttacacgcgagctaccacttcctcttccaacctatatttcaagctctgaaccacaaactgcc

SEQ ID NO: 16833 - DNA, 537 bp, Gossypium hirsutum
  Clone ID: LIB3829-024-Q6-N6-E7
aaaaaaaataatatatactttagcctttaaacttgacaacttatacttaacttgtgcctgaacttttttcagatctaactagtacatgaacttggaaactattaaccaagtcgggtttttttaagtacttggtcgacgccattaaattttatgctaacagctgatagttcttgaaaagttatcgtttataaacagcataaactgcctaatataattgattctcgtaatatctaacacactgttgagcagaaaaagacacgaaagaattagaaatgcatttatacgtattatgtctatttaccggccactcctttcttctttggcttcgagagcgtctacttcctcattagataaaaggtcaagaacgggtttataataatcccactcctttcttttccggacaacacttgacctgaaactgaataacttcatcaagtccagtgcagcaccactagctttactgggagtgaaatgttcagcagcccgacgaccctttttgcttattctgttctcccttgctgaagttacattttgaat

SEQ ID NO: 16834 - DNA, 555 bp, Gossypium hirsutum
  Clone ID: LIB3829-024-Q6-N6-E8
gggagactaaaacttcttcgctacttcactcaaatacaaggctcaaacaaatgtggccaaggttccgcagtatacaaactgtgaccaaaccaaataacagttgaaaactacatatgataaactgcatttgagcacctccgatcatgttttccctaggaacaccatcttttttttctcctagccctgaaaatatgtggggatcaaaccaattcttgttcatggcagattgcggtttacgccaaaacaaaataacatacctaccctcaatttcttcctccctactcataaccaccaatgccacttagacgtccatggaagttacccccaccacgccttgagtgtgtctgacccctctccttgtaccttgcaccagtgccatgagatccctctcttcctccttcaggattatttgctctactattattgttattattttggggtccaactggctggtactcgtaatgtgaattgtgcctctgcctctcacgatttgctggtgggttaggctgcttttcttgaccagatgagccccaatcaccacgagattcatgccct

SEQ ID NO: 16835 - DNA, 510 bp, Gossypium hirsutum
  Clone ID: LIB3829-024-Q6-N6-E9
gatgaaagggcacttaaaaaaaaggactacctgttcgtatatatgtctatcaaatatgttatgaaaaggggtcattctttttaaaaggccaacctcgtaatcttacacacaagcttcgtactttgtttagggttgggcccatagccctatgcaatatgagtaacaatactactaacacacgtaaaaccatgaaaaaaatggaaagttaaaaatgaaaaagggcaaaaaaaaaaaaatcaatgaagcaagttaactggtaaggtaaaaaaaatgagtttacaagcccccctattgaaaacccagtagtagatttgggggttacttctccttgactacctgtaatatgaatgctccataaagcaacccgtatggttgtacggttgaacatcaatgaacaaaaatccgatcctaattcttgcttcaagttttgagggcggggagcaattgaaggcttttatacctacagttgggctatgacttccgggaatatctccacaagcaggctgccaa

SEQ ID NO: 16836 - DNA, 541 bp, Gossypium hirsutum
  Clone ID: LIB3829-024-Q6-N6-F1
gggataatccaactttagatttccccaactccaatacaggcatgaatcgcacaagtttctgagatagagcatatttatcacaaagtggtttgcttcagtagctgtacaaacctgaaggagcttgaagcaatgctacagtcatccaggttcggatgcacaaattctcaacacctgactattatttgtgtcaataaactaaaaaagaattcttaaattcaacaattggcgaactggaaatattttatccccgacctggttcaaacttcaaacaccacatagaaaactgctcacaaagtccaatttagctgcatatatcttcagaacaccgaactccaaatggccacagaaaaagtaaattgtagtctactttctaccttctctgactatcctgaacagcatctatcaggatttacataacatgacaagcttggtagttatatattgttggcatactgcctgtcaagattccacagcctatccgaggcatacttaaccaattcacaaaatcaagttgaaacccaacgtacaactcaactttaca

SEQ ID NO: 16837 - DNA, 554 bp, Gossypium hirsutum
  Clone ID: LIB3829-024-Q6-N6-F10
gaaataatcgtaggcgaatggcgtcgtagatttccataaaattagctacatgaatatttggatattcgtcttacaaaccatcgaactgaacaaactgttgtaccatctgaatagtgttcagcttcaattcaaaattatttgcaacaatggtgggtctcacaatactcgatttagccccagtcagagtaagcttggcataatcgtaatagtacgagaaacagaagttgcagtaactgttctttcaatcttacgatcgtaaatcaatgatctcgacgattcttctaatcagaaacgaaaggaatctgagagatcagcctgtcgaggttagtgtaagcaggcctctcaatatcgagagaccttcgacaaatatcatagatagcttcattatcaaggagaacagcaacatcagtatgctctaacagagaatgggttgatcaaacactattgtaaggctctacaacaaatgtggaaaactgtggagaagggtaaacagtgaaacccaattttgatttcttaccataatccactgaaagcgtttcaagaagcagtgatcc

SEQ ID NO: 16838 - DNA, 553 bp, Gossypium hirsutum
  Clone ID: LIB3829-024-Q6-N6-F11
aaaaagtgatacactagagcataatttgttgattcatacactcctatgagatcagcatctggctctcttctttcatagtgaattgcggtagtattttaccctaaaaaacaagaatatgaatgggtgtagggaatggcaaaatatgtacaaatatatgtaaggaaacccgacatctggtcatcaaaggattgcgcctgataatcctcaaactttgaagagctaaactaaagctaaactctaaaaagttgggaagaaactaaagaaaagaaaaggccctatgtgacgcctatttgtcaagaacctggcaatgcctccctaaatccaatgctcaaacccttaccctcacgacccctcttaccaacttcaggattccctttctgcatcatcgctacaaattcgttgtaatctatccggccgtcattgtcctgatcgacttcacgcatcatttcatccatgcggatatccttgatgccaaactcttgacaagctttttgaagctcatctagagtgatgtaaccactgccgtctctgtcgaaatacgagaaggcagcca

SEQ ID NO: 16839 - DNA, 530 bp, Gossypium hirsutum
  Clone ID: LIB3829-024-Q6-N6-F12
ccaaaaccagatattaaatataatttccgtagaagtttgaccgcaaactgactctaatttttcaaaaaaaatctcgtacaataatagctatgaacattaatgttctcaaaacccttgaatattaaataataaaataaaataaaaaagcaccacaatccagtctccagctccaaacatccttttaagcaacatggttcaaagatggattataaggaaggaattaagcaccaattgtccgcccaccgccatctccataggacccatcatcttaatggtggtgatacggtgaaaggctaaaataataatacgtcaatatcaagtacaccatcctacaatgatccctaactctccccacataaaccagactttggacttcacttaacatcgcacacaaaaaaagccaactaaatgcaaaatgtagatcaccatcaaaagcaattacaaaacttagaagcacttcctgtggacaatggatggaccggattcatcatactcacccttggaaatccacatctgctggaaggtgctga

SEQ ID NO: 16840 - DNA, 552 bp, Gossypium hirsutum
  Clone ID: LIB3829-024-Q6-N6-F2
aatcttaaaacagcacacttaattaacttcaaatccgaccaaaacagcaatagtaaatgcaaaacatatatcaagatccactacaacaaagttctggaaacaaaactcaaaaccatgtctaccaatggaggatattgtaagttccaaacaaaggcttttaaagggttcctagtggtggttgatagtagcctaaggtttactcttcatcatcttcatcaccatctccaccagcagccttcttggcagctgctctctggttctttctcttcactcttccagggcggccacctccaaacggactagtaagagagaaatcaatatgcttttgggagtcgaccctcaccatgaaggacgggatgttcacaacctgcctcccgacccttatgtgtcgttgcctgatcaacacacgtgcatggtgaattgacttggccataccagtcttgaacacgagagtttgcaaacgacgctcaaggaagttttcaacagtcaaagccaagacataatcaagcttgttctggctctcatccaaaagtccatacctgttcatcctac

SEQ ID NO: 16841 - DNA, 519 bp, Gossypium hirsutum
  unsure (1)..(519): unsure at all n locations; Clone ID: LIB3829-024-Q6-N6-F3
aagacagaatgagattcgcatataacattangaaacctcgagacatgtacattcattagcacatcaccacatcaagttaaaacttgcgggtagcttagcactaagccaatgctcatcacatttaatttatatacccatataccataaacacgctgtacattcaaatttcctcatactcatcatgcttcttaatgttctcaccccaagcagcaactctcttcttccggcagcagaggagtcctgcaaagagggcaagtaactttcaaataattcaaccatttttccaagcacaccttgtgaaagagatggccgcaagacaatcggttaatctccgatttaggctcaaactcagacaggcagaccggacagtcattctcggctcgcttgcaactgcataaagtgtcaaattgaattgccggcgtcctactccggaactcctcaatgtaaaattcagatgtactgaactggaaatcaaatgattcattttcgatggaatctggggatggtgatagcgacgag

SEQ ID NO: 16842 - DNA, 552 bp, Gossypium hirsutum
  Clone ID: LIB3829-024-Q6-N6-F4
gttaaacaaacgcactatgatttattattattacttgtaaaagacaacatgcaaactgcctcttctaataaaaacatacaagcacaaacactaaatttaaacgacctgcttgggacccaggaaccacccattacagagaacagattgaacatgaaaaatgcccccccccccccaaaatgcctgcttgaaccttctctaaactctctctccctgccatatgccaattgcatgttagtttagccaataggcaagctatcattggtgggtcatttccatgccccagtcccaagcctcatccaccttaatactatcacatccttattcaactagaattgaaactaattgatttcaacatgcaaacttagctaacagtaagcccactacacaagcttccattgattccccatcttacaagcttatttactcggtagtagtattctcagcttgagcttcagctggtttctcttcttcctttgcagcttcctctttgggtgcttccactggggcggcttcggcttctgcttttacttttgctgctgctgctgctgctgc

SEQ ID NO: 16843 - DNA, 545 bp, Gossypium hirsutum
  Clone ID: LIB3829-024-Q6-N6-F5
gatatcaataacagcttcatttagaatttagaactaaaacacaacagtaacaattgataacataaggagttacacaatagaaaatgctagcaaataaggaaatcattaagagtctttatccagataaaacttgcaaacaacacttcaatataacaaggaaaacaacattttagaaggctctaaaattgcagtctcgactttttcaattacatttggaaagcgaccaaataaaggaagagcatgcgtttatatgaaccatgtcatcagcgcctgctggatatgctgaatgagctgacctttagtggggtagcaataaccagtggggcttcaggtgaatcactgactgcaaacttatcgtgcatgaaacgactgtcgacaatagagtcatccttaaggactatcttgtaacaatagcagctcttcaaaccctcttgattatggtagcattcatgagacccgttcttcacttgttggaagttccatatgacactaaacttgcctaccgttgcaaccaaatgacgctcttgcttcccgttctcggtgac

SEQ ID NO: 16844 - DNA, 524 bp, Gossypium hirsutum
  Clone ID: LIB3829-024-Q6-N6-F6
aaaacaaaacaaaacaaagtttcttcactacaagcacaggtaataaataaggaatcccgcaattccaaattttccgtacagcaaaagaagaaaaagagggccatgcacaagcccaacacttttccaaactctttgtatctttttactgactacaattgcactattccttcaagacaataaacacagccaagtcaaccatatcaatcatcaactcagcaacactgtccgcatcccatcttttacaggccagttgtgccacgatggggtattatatatttcaaaggtgaaaacaattcttggagttttctttcaaaaaaagtcatctcatgagagaaaagtaactttttgtcttcagtccaccctagagtaatcaatgtggaatgatttcaagaccttactcacagaacccccaatgctcagtcgtattaacgtttcttggaaataagttgagtttgcatatcgaaaagaaaatctagctctccctccaaacatttctcctataaacaccacaacacagaattaca

SEQ ID NO: 16845 - DNA, 526 bp, Gossypium hirsutum
  Clone ID: LIB3829-024-Q6-N6-F7
actcttgggtataggtaaaattccattgttaagagtctgctaccctagcacgtatctgtctgcctctctggcaagtttaggttctcaaaagtttttcttggcctgacggcttacatctccagtgttttgaataattctcttcgttcggttttctcgtgttacgcccatggaatcagaatttgctggtctatcccttgaagatgaagatgaagaaatcctgaaaaagtgtttggacgactaagggtctgctcgaaaaaggtctttgctggagggtgggaaaaggtgataaaatttcaatacgagatgatcttccaaccgattgtagcaaaaaaaattttgaagatcccactggcggagatggaacatgaagactttcaagtttggagaggggagtcgaccggcgagttttcaattaggagcgcctataaactattacatgaatctacattggatcctaatgatttaatattacataccaaaactataaatttctatagaaagctatggaaaccggacgcgtgggttc

SEQ ID NO: 16846 - DNA, 553 bp, Gossypium hirsutum
  Clone ID: LIB3829-024-Q6-N6-F8
agacaaaaagcatttccaccaaaaaaagaaaacatctgtttaacctttttcaggcaatataatgttacaggttaccgaagggaatataccagagatgtagttttcacctgtgggtcaaggagagcgaggaatttgtccaaaaataaaggggtaagcttataagcttttatccttctctctcctgatttctgagatctaaacagagggtagcttaccttgaaaccgagcaggaacccgaactccaaagaaagcagtgacttagtccttgtaggagctttgagttcatttggacaaaactcatcttgaagggatttttatttattctacaagtgaaatataaagggcaacagccatgccagatgctagtgagagtaactgcactgcagtatttttcaatgttgttttgccattgttattcatttctgcaagcactccagcaacagcaatgtatataaatccaccagctgtaaacccctcaatcaaagatgactgtccaggatcttgtccccaaagcaaagccattgcagttcctgctagagccaccagtgctgaa

SEQ ID NO: 16847 - DNA, 530 bp, Gossypium hirsutum
  Clone ID: LIB3829-024-Q6-N6-F9
ataaaagcaaaattctcatgcattactgtgtcaataaagggcgcataaaatcagataaaccaatataaaattacaaatagcaaagggaaaaaaatgaatggggcacatcatacgtagattagaaacattcaggggatggcttagatatagggtaagaaacacgaggattattcagcactgtggataaagtaagcagtgagcaggagggatgggcaaagcttggtttaagattgagactcgtcccacttgaggggcttcacaacttcccaggtgaagtcagggtcgtcccttccaaaatgtccataggcagctgtcttcaagaaccggttattgccacccctcttgaggtccaggttgtttgtgatcatgccaggcctaaagtcgaagttctccttcacaatttggagaatttccttgtctggaatctttccagttccgtagctgtcaacgaagacagacaagggctcggacacaccaattgcataggagacttgcacgaggcaccttcgggcaaggccatttgctacaat

SEQ ID NO: 16848 - DNA, 553 bp, Gossypium hirsutum
  Clone ID: LIB3829-024-Q6-N6-G1
aaagggtaaaaaagggattgacattgatgtgataacatgtgccttacaattacaacttttcaggaacccattagaatatgttaagacattattctttcctacgtacaaaatactccgaatccctaaatcacaatgattaaaataaatcacgctaagactacaatcatcatgttgtaaatgaagagtcatcccatcgtgaactatatattaaaaaaaaaaatccaaagttttccatgctatcttaattatattacccactattataatacaagaaaagggtccattttcagccacttataccttgcatgaaatatccgtcagagaattcactttctacgcattcttcagtcaatttacaagcttactcttactttttttgtgtctgttaatgtcattacgatcttcatctccatcatgcttccttttcttttcatggtgcttttttaagtgatcagcaccagaatcataatgcccacttctatccttcttcttttccttgtctttatctttacttcgatctttatctttatgacggtgcttgtgcttcttatgc

SEQ ID NO: 16849 - DNA, 545 bp, Gossypium hirsutum
  Clone ID: LIB3829-024-Q6-N6-G10
agtccttaacaaatagaccattaaatgaagggatctttaccttccaatttaggcaacaactattaatgagtagttcttcaagctaatcatttgttacagaagagttataagttacattgaagatgaaagattatacaggtacaaatgctcatacaatactctccaatggccccaagcaaaaataccatcctccatccgttcctatgttactcggacacagataattcgtgggaaatgaaaaagtcagagtaacatggttcccatctatgacccatttttacaaatttaccagcttgtttctttatcagaaatggaaaatataattcagtgagatagcatgtcaacatgatttacaaaagatactcacagatcatgcggcatgtatgcaattcaagaggaaaccaggtcgtctaccattccatcaactaaagtttgaacaatatcccagcccatttcagcaccagtttcgtatgcctcgatatcaaaatctgtccatttcccaagtgaataactcatctcccattctattagttcatcaggtacca

SEQ ID NO: 16850 - DNA, 546 bp, Gossypium hirsutum
  Clone ID: LIB3829-024-Q6-N6-G11
gtaaggacataaataatagatagctatattgcattgccaagaagtactgtttaccctaaaagctgcagttcactaaaagatactataagttaataggaaattaccaacaagtggtggtgaggtatgttatgaaggggcaccatttgttttttgtgactgagtgacactccttaacttttcataagcttcagagcaggcgtgagaatagtccgacaatgcgcggaatatctcaggcaaccggattttaagacttccaatagatttctctcgcacttgaatgcagtgctttttgagagcttcggcttcctcttccaacctctttttcaagctctcgaccacaagctgcctctcggagacaggatcctttgcattcgtgtcttcacctgcatcattttcatccaatgcagatcttcgttgcttgtacttgtgataccattcctcgaatgcctggctcttgcgcaagaattccttcctagtttcctcgcatttttcttttagcttcatctcttcgtcttgatggatgattattgtttttatcactgcagc

SEQ ID NO: 16851 - DNA, 531 bp, Gossypium hirsutum
  Clone ID: LIB3829-024-Q6-N6-G12
aagcaaaacaaaatattaatcccttaaaaacaaattaaattgttcaaagaaagatgcacattatagctcacacagatggagtttgttatagtgcatcctaattaaaaacacaaagttacaataataataataataataataaatccatggcattacacatttcttttgtttcatataataacataaaataagtttcttatgaagaaatccatacccatggtttcttcttcttcatatagatatatagatatatatatactatggtaaccaacctgtcatataattattcacacttggccctgcagtcaccactgacattggatcatgctgatatccgatttgtaaagtcggctcacaatccaatggatggaagaaggcatcgccatgaggctgatgatgaacctgttgacggccatagccgacgtcttccgttgcatttggattcaattgtaacgaatttacttgatacccttccaccaacctttgttttagggtcttattggcttcattaagaagatgttcctttctttg

SEQ ID NO: 16852 - DNA, 539 bp, Gossypium hirsutum
  Clone ID: LIB3829-024-Q6-N6-G2
ggatagctaataataaccataaaatttttattactttcaactcataaggacattaattttaaacttgcatccataaccttaaatcactaacatgaacacagtatggagatgtgaaaactacgatgatccaactttcttattgaacattgccgtagaaatagaatggtctagtattgcataataggcctacattaaaagctacaaagtattatgaatatatatatcctgtgacacgtcatggaaatttgacgaagttatcccatccagttccttggggaagaacctactgatgttgacattatgtataaactgacgatcgagggctgatttctactggtgaagtaagttacagaaaaggctcatataacgctttcctggcacttgggttcgaagaaaacatggatcgatacttgggcttctttggaaggatttgacagcactctgagctccacacttttatactcatcattcaacattatctgaagaatatctgaaatgtacataacaagagcttcatgaacaggcttgacatccaccca

SEQ ID NO: 16853 - DNA, 531 bp, Gossypium hirsutum
  Clone ID: LIB3829-024-Q6-N6-G3
aataaaatgcacatatacatgcatgtgaatatatacatatatatatagcctcagaatacaaggattaaagggtattcctagctcaaaacctctggttcaaggattgcattccgcatactaacgtgccaagcatgtcaacttattgattaaacaaaattcaactgtttgttattagggaagcgtgtgtatcagtttcaagctacaggttcagaacctaaaacatctctctcaactgcatttagctttatatgcttcccatccttgaaggcggtattcgcgagctgcctctgcagggtttgctgcctttatgattccgcgccccacaattattatgtcactacccctatcaaagatgacagaatatggagtgttatactgctggccaagatcatcaccaccctttaccatttggactccaggggttgcctgaatgaatgctggatttaccggtgccctagaccatgatgccggattgacagagataaaaccaatgacaaaatcagaatgctcttctgcaatttttactgcagc

SEQ ID NO: 16854 - DNA, 538 bp, Gossypium hirsutum
  Clone ID: LIB3829-024-Q6-N6-G4
aataaatggcgtgaaaatgaactttctcccttcatcaaaagtctcaaccttctcaggtttattaattttgcatcgacccaaccatcaaactgttgcttttctttggttgggtttttccctcatttcagtataaaattgatttttcacaaaaacaatgaaagcatttcgaacaagtttgtcacctgaaactaatccaggaaatattgttttgcttttctttttctagggaaaatcacacacacactaattaaggagacctctttgcttgaaaacctcatgcattgcaacaccaatctttgcaggtgattcaacaactgtcactccagcttctcttagagtctttattttgtcctgtgccgtgcccttgccccctgatactatagctccagcatgacccatacgccgtcctggaggagcagtgagtccagcaatgaaagcaacaataggcttttcagtcccactttcctttatcagtgcagcggcatcttcttctgcagtgccccctatctcaccaatcagaatgatgccttctgtctga

SEQ ID NO: 16855 - DNA, 537 bp, Gossypium hirsutum
  Clone ID: LIB3829-024-Q6-N6-G5
gatcatagaaatgtatgataagataaaaatttgccattaaatacagcaaaacgatgtagcattacattacattatttattcccttaaaatgcacatatacttgacaaaaagcccttcatccatggccagccaatccttatgcatccatgcgaatcatgcacctcaggccctcgccagcaagcatgtactcaaatgccttgttaatctcagagaagggaactgagtgagtgatgaacttgtcaagttcaagttccttgttcatgtatctctcaacgacagcaggaatatcagttcgaggtttgtagttgccaaagaaagtacccttgagagtcctttcattcagtagattcactggatgagttttgaatgcatcgtctttgttgggaacccccacaagcactgcaactccccaaccatcgtggacacattcaaatgcagaaatcatggcctggatgctcccggtacattcaacactgcggtcgactcctccacccgtcatctcagcaatgacctcttgaacaggtttgttgtgatctt

SEQ ID NO: 16856 - DNA, 521 bp, Gossypium hirsutum
  unsure (1)..(521): unsure at all n locations; Clone ID: LIB3829-024-Q6-N6-G6
gaaggaattcaactacaattgacacggnaaaaagcaaacacacaatccgtgggcagatgccagtctcaaccaaatgaacacatatcaaaattggtctaaaaaactgttaagtaccagactacatagaaaaccaaaatcaaaaggctttgatactatcaaatgcaatctcatttcttcttggcagcagatttggtgaccttagcaccggttggatccttcttctcaacgctcttgatgacaccaacagccacagtctgacgcatgtccctgacagcaaaccgtccaaggggtgggtactcagagaaagtctccacaaccataggcttggtgggaaccatctttatcatccctgcatcaccattcttcaagaacttgggctccttctcaagctcctttccagatcgcctgtcgatcttggtcagcaattcagaaaacttcacagcaatgtgggaggtatggcagtcaaggactggggcatatccgtttccaatctgcccagggtggttcatgatgatgacctg

SEQ ID NO: 16857 - DNA, 548 bp, Gossypium hirsutum
  Clone ID: LIB3829-024-Q6-N6-G7
aaacgtggagaagcatgtttggatttcctttcagttcaattattttgagttcaggccagattcaaatccgggctaagtcggatataagttctaaaacctattgtttgtttttcatgcgatatagaaactatgtcaacgtattaattcccaagacatacggccactgctcatcttatgtacgcaatattttataggcatgggaaggggaaaagggaaaagttagtaatactaatcagcaaaccttgcctgtgttatcttaaactatcagaatatctgtcttcagatgtgaaatcgtaactcgaactatcttttcctccccaatcagaaacggttcgccgcacaaattgccccttcacacgaggtcgttgttctgccaacttcttcctgctctgataccgtaccttcttttcaaaacatctttctttccttttctggcgaaatttggtcaaggcagccgctctctgtgcaacccggtcttcatctgcgccactaccaccacgtctcccactcgctgtcccattgccatcttccgtgactgcatgttcagc

SEQ ID NO: 16858 - DNA, 548 bp, Gossypium hirsutum
  unsure (1)..(548): unsure at all n locations; Clone ID: LIB3829-024-Q6-N6-G8
gatgacaagctatgtatatataataagaacactatggcagacatatactcgagttcctgggaacatgcacatangagaaaatctcatactaacagtcacatcctagtaaatcaacccaccctaaaacaaggggaaagaagggttctccaaaccaatcatatttcatggttttaacatgtataaataaccaccaaacctgcaatcaaccttaccccttttcttccatgaaacatatcatatatagaccatgcaagctttaacattgccatgcatcttgcaaagcagcaattagagccccctattgctgcttgcaatctggcggcctcacaccttgctgcccatccccttgtgctcttccactcttctttcgtgcaaatgaggactttttggtcttacttccttcatcatcctcatcatcgtcatcgtcatctccatcttcatcttcatcctcatcatcctcgtcctcatcctcgtccacatcatcatcatcatctcctatctctaactcatctccttgaatagcttctcctgtaaaccatgacactgca

SEQ ID NO: 16859 - DNA, 525 bp, Gossypium hirsutum
  Clone ID: LIB3829-024-Q6-N6-G9
cagaactggtttttatttagatccaaagttatggatataagatgatacagcattgttacctacttgcctacataatcaagaaatttcccagaataactctcagatcagatcagatcctgcaacaagctatacatacatacacacatatatatatagctggttttgttctagtatggtttctcacctatataattaccaggaggaatataaaaacaaatagttaaagtaacttgatccttgcatgtagcttgtgagcaacccaaatccgaagaattcttccaaacaacttgagtataaacaccacatttatgattcggtgcacaagtattagtcccataatcataataatctttctcttttacccaagtttccaccgccatgagcggcgtcacggcggctccgctaccccataactggtttgctccgtacttgtggtttgtcaggtttgcgaactgacaatccattttgttcctttggtaccttgcgatgagacttgaagcattggctagttgttggctccatttg

SEQ ID NO: 16860 - DNA, 477 bp, Gossypium hirsutum
  Clone ID: LIB3829-024-Q6-N6-H1
aaaataaaaacaaaacaaacattgaaaaggggaaaaccacgaagcaattcatgcctgtacctacaaccaagaaaacctccgaagatcgcccattctacacttcaaaaattaaaatgccgaaagggacccggtgccagtaggatttggaaaacccaacaaaccacaacccaaaaagtctgaactttaaaaaaaggtgaccctaaaaaccaaaaaagggcttttgaaataaccaatttaacctgaacccaattattttttgcccaacctgtgggtttttaggcaaaagggccaaaaacttgagctaactttacaacaaggaaccgtaaaacgggtatcttcacccataaagaaaagattataggcttattggaaggaaaaaccaccttttaggaaattataaaaaaaatttcaaaaaaactaccattggttataaggaaaaggaatttttcaattccggcaccttgaaaaacacggggg

SEQ ID NO: 16861 - DNA, 546 bp, Gossypium hirsutum
  Clone ID: LIB3829-024-Q6-N6-H10
aggtaaatatgcaaattccattcaaagagaaaccatacatagatgcaaccggtaaacaaagactagaaattatttaaaaggccatcaaagggcacaatccttcacgtaaaaccagaaaacccacattaaggaagaccttaaggcttagaacccaccacgaagacgaagaacaaggtgaagagtggactccttttgaatattgtaatcagccaaagtccttccatcttccagctgtttcccagcaaaaatcaacctttgctgatctggtggaattccttctttgtcctgaatcttcgctttcacgttatcaatcgtatccgagctctccacttctaaagtaatggtcttaccggtcaaagtcttgacgaagatctgcatcccacctcgaagacgtagaaccagatgaagagtcgattccttctggatattgtaatcggctaaagtccgcccgtcctcgagttgctttccggcgaagatgagacgttgctggtctggcgggatgccttccttgtcttggattttggctttcacgttgtcgatcgtgtc

SEQ ID NO: 16862 - DNA, 541 bp, Gossypium hirsutum
  Clone ID: LIB3829-024-Q6-N6-H11
catagtaataggaatttatttcattaacaaagcaagcttttacaagataatttattctctcatcacataatataaaactccatataaagaactctcttttttttttttagagagagagagttctatatgggcactcttgataaccgggaaaggtagcttaagtaggcacataaatataacacatagtaggacaaaacattagagttttgatccttggttgggcaaatatacagcagcaacactctcttaagcatccaaatgaatcatgcatctcagacctataccctggagcatgtagtcgaatgccttgtttatatcggcaaaaggcacagagtgtgtgatgaacttgtccatatccagccccagctccttgttcaaatatttgtcgacaaccataggaatatcagtgcgtggtttatagttgccataaaaagcacccttaagggtcctctcacttagtagattcattggatgagttttgaatgcatcgtctttctttggcacacccaccagcacacaaacaccccaaccatcatggacg

SEQ ID NO: 16863 - DNA, 537 bp, Gossypium hirsutum
  Clone ID: LIB3829-024-Q6-N6-H2
ggcttcaacttgtccattatattataatagacttgtgcaattcaagcaagaaaaggggaccatacatgaaacccacttctaaattaattgaaatgatcacttcccttgggatcacattgcatcgtctttattacaaaacaagtaaaaaaccaaccacatacttaaacagggatcattacagaaacaaacaaagcagatagggtgggtggtttggttttatctagtgatctccattaataaacagctaattaaatgaaagaggatgaggttgtgttgcggctcctactgctgaaccacttgctgtatctgctgacgctgcatgtgttgcagattaagtcgggagcatgaacgaggcatctcaccggctagtgggatgaccggtaggttatcacagttgcatatctcgatcatgaacccatctgggtcatggaagaagagttgttcaacgtagattccaccttcttccactattgcccgtacgtgttccagttccatttccttcagcttcttctccactgctcccatgctctcacactg

SEQ ID NO: 16864 - DNA, 495 bp, Gossypium hirsutum
  Clone ID: LIB3829-024-Q6-N6-H3
aaaaaaaactagatgtttcatttccattaaagtaccatccatcataaggggattctaacaatgcttccattttgcttaaagcagcctccccctgccctgggaaaaacaatcccaattcccaccccgcaaccaaaaaaaggggggggggttccttttaaattcaaaaaaaggatgatgggggagagccattggggaacatcaaagaacagtgggaacaaaatttcaaaatcattttacagttgggaaacatgggaaagattgaacgagttgtttacttcacttttttcatgtcctcctcagttttccacacaacattttaaaaacatgttgaaaggtttttgtaaaacttatggaattccaatgtgtccccctttgctttccgcaactcgaccatttgtaaaaaaggggccatttgaaatatctccgcccccacgttaaggtttcctttcctcccggtttttgaactctcgagtctcatcttgaagtttttcttgg

SEQ ID NO: 16865 - DNA, 553 bp, Gossypium hirsutum
  Clone ID: LIB3829-024-Q6-N6-H4
agccaacccataaaaatagaaaccattccatgataaaacaacaaacaattaaaacaaaaacatcaaaaaccacaaataatttatgtctttagcagagtactgaaaacaagagacaaaagcaataataaaaaggactaaattcttcagcaaccactttttttttctttgcttcaaacctcagcacttgacctccttcaatgcatatgcaaagtacaaaaatgttgggtcaacagcaccatccttgtagtaagcaaacaccaagcatccatcatcatgcatgctctctcctacgaaaaattgaaggtccttcaattttgaaagcaaaaacttggttgctccctcaatgtttttcttgaaggactcttgcttttccgcatccagttttggtgtcaagttcttgatgaacttcttgatgaacacgacaaactgcttcttgtcgaaagggggttgctcctgaagcctgaaagtgtcaacaatgtcaacaaccttcacagcttggtcatcaacaccttcatcctcatcagcaccttcggctgaaggattggcaccaatg

SEQ ID NO: 16866 - DNA, 531 bp, Gossypium hirsutum
  unsure (1)..(531): unsure at all n locations; Clone ID: LIB3829-024-Q6-N6-H5
cataagcaaacagcagttgtatttatatacactgttccagtgttttacttaaatcactccactaaatacacaacaaattcccttcttgacttggagaactcttttacaaaacccagnaaaccaaagaaaaaacacccaagccattatctaaacattaacctacgctcctctcctctcctctctccttatttctattcaacttactctcctatacttacaagacaccaagttcttttttcattacatacaaacaaccctttatccatatatttacactaacaaagggttctttgcttttttctcttcagtcgcttacaatttcaaaattcccttctctgttttatctatgtactcttttgttgattgaaatgggttctaagccagtgcaaaacaatcaaacccctccactctcactgctggtttgttaccaaaattggcccgaatacaccctcctttccttgaagatgatgacggagacgaaggaggaggcggatttggagacggcgggttgaccatcttctcatccccaaa

SEQ ID NO: 16867 - DNA, 554 bp, Gossypium hirsutum
  Clone ID: LIB3829-024-Q6-N6-H7
aaatagacttttatttcttgaaatcgaatccaagcttcttatacttatacttacaagataatgctcttgtcccctgtcaagagattgtaatctatgtttaaataatattatcacgaaaacaaatgttttaggagtaaaattacatataatgaaattgatgtggaaataagtgaaggccaacaagcaattgaaatctaaaggacaatgacggatctcatatggtagtgaagaatataaggggggaacttggactcggtggtgatggaaatgactcaagcgtctctgtctctcttgcactcgggcgacattgtggggtacctcaccctatcgctgcaatagttgtaaatagtgaacttgttgcggacccaacgcagtctgcgccactgataggcgtcgaggtcctcgaatgccttttggtcccaccaccgctttccctgtgtggcgcagaacttggcttccaccgacgactcgcacccgtcgatgtggaagctcttgtatgcggctatgaatggggctttggaccagtcggtcttttcgagaccaccccttgtggc

SEQ ID NO: 16868 - DNA, 545 bp, Gossypium hirsutum
  unsure (1)..(545): unsure at all n locations; Clone ID: LIB3829-024-Q6-N6-H8
aatcaacaatataagacatcctaataaaaaatattgaagcaatgtttttctatcaaggactaaacaacacaccaagtacactacaaaatatcagtangaaaactaaactcagatacataatatagcatcataatctaacagcccatgagcaagccactgccttgcaagtttaaactcgtccaagattcaatcgctgtcaccatcttcttcttcttctgattcttcactttggctgttgccatcatcaccagctttttcatcatcattatcttcatcatcatcgccatcatcctcatcactttcttcactttcatcatcatcactcatatctggtattttaggctttggtggaggaacaaaactggttgtagaccttctacgtgaacttgacacaatattactcatgtcaatcccttctaactctctcgctctttcttttctcttcctcacgtccttgatttctttttctgaaggctttgcagataatccttctttggaaagaacctcctctagttccttaattaattgggcttcacgtttattct

SEQ ID NO: 16869 - DNA, 543 bp, Gossypium hirsutum
  unsure (1)..(543): unsure at all n locations; Clone ID: LIB3829-025-Q6-N6-A1
aggaaaatgaggaaaagctgctttttagtgaaaaaattaaactcatgaatacatagtctcaactctcaagttacataagcatgcattataaagtacttagcagagaattgtcctgcaaatatactacttgatttcataagatggttataggtactaaataaacaggcaccaaccacctacaaatccaaaaaacccatgtacctgcttttctgaagtagtgatccgttaaacatatatactacttactttcggtaatggggagataaacaccttctgcagccaaccatacattgtcggcacgtttttcttgaacaccacaaacctcttgctgtccaccagctattctggcatatttcttatcatgactatggaggtaaccaccagtgtccacatgttgaagccggatcttttgatcttgcttccaagtcttcccacttccctcaataatgagcctccagtaatcaccggtatctgattctggttctnctccaaagcagctaacctctaggtttcctgatattggagatgcatgcaaatggctat

SEQ ID NO: 16870 - DNA, 516 bp, Gossypium hirsutum
  Clone ID: LIB3829-025-Q6-N6-A10
actaaaaacctctaccatttgataactgcaatgtacagtttgatatgaaaaccatgtaggatgatcgaaagaccggagctggtcactctttgttgataattagtccaccgcaagaagctggggtgggagcggtctttgcagcctgttcaaaagcattggctaaagcctgcaacattctcaaaatctcgcttcggtcttccacgtagtatttggccttgctcggtttctggccgacagtgcaagcaaacacctcggcaactggggagagacggggactggtctttgcacgcatgatcacctcgaacatgtcctcgtctgaccggtcgtctccgatacaaagaacgaaatccggaagctttcctttttgtctcattggcgggagaagatgttcagcgacgagacccttgttcacaccctgaggtttaacttttacaacatgctggccactcttaactgaaaccggctcgttagccaaaaccctttcgaggtgatctaaaagctccttagcctggcaaa

SEQ ID NO: 16871 - DNA, 536 bp, Gossypium hirsutum
  Clone ID: LIB3829-025-Q6-N6-A11
actacaacggccagtgagctgaagactgaccaaatgcaatgagcatcaatgcggaaagtaggcatggccttggggtagactgtggagtattggtgagcaagtgcacaacttctctcatggtgggcctagcagagctctgctcttcgacgcatttcatggctaccttgaacagatggatgacacccgtcaatgggtactcactcaacctggggtctacaattgtcaacactgaagcaggatcagcgtgttgtggtatggtcttcctgacccaccacacaatgtccaccccgtctccaaattcccccacgggtttccttcctgctatcagctccagcagcaccacaccaaaactgtacacatcgcttttctcatccaccttcagtgtgtaagcgtactctggtgcgatgtagccgtaggaaccagcaatggaggacatgcactcggaggcatcagcatcctgcaaaaacttagccaggccgaaatcagcaacatgagcttcgtaatattcatcgagcagtatattgttggacttcaca

SEQ ID NO: 16872 - DNA, 530 bp, Gossypium hirsutum
  unsure (1)..(530): unsure at all n locations; Clone ID: LIB3829-025-Q6-N6-A2
agcaaactgaattcaacttgctcatataaagcaaacggaaaagagtcttaaggataagcagctgaaaaatccagacactcaaattacagagagcatgtagggccgtgctcactgtactttatttaaaaaacaagatcaagagagaaacatatttgtacctagaagtagccatgcaaccataccaagagctagagaatcactcctcctcggtctcagactcagcattctggagccactcgatgaagggcttgacgttcttccatatctgagagctcttattactaccacctatacctttctggtaccactccatgatgagctcttcttccaatatgtcatcatcatacaatacttanataactaaagccacctcctttgctgcctcagggctggccttgccgcaaaataactccatagaatgtagaagcatcatctggcatccctcttcattggctgcagctgctgccgccgcccctgctgcaaggtagttcttctttttagttacttccttagcaaaccctttcccaaca

SEQ ID NO: 16873 - DNA, 538 bp, Gossypium hirsutum
  Clone ID: LIB3829-025-Q6-N6-A3
cggctaacggaggacttgctacatctcataaatttgatttaaagcagttggtcgatacaaagagttagcatcaagtacagtgattccctaacaagaatgtcaaagtcattctggtacacatcgtcaactgccgcatgaaaagtccttgaaaatttagtgtaatcacttgctgcatatcatcaatcttgaaggatttttacgctgaagctcatccatcagcagatgcgcaaccgatttgtatcccaactcccgagctctgtagattgctattcctgttggagtcatctttcgattcttcagacacaatgaactattacatatccaataaggattgatccctttttcttctatgcagtgtgggcacatccattccttattttctcgtacctcttccagttcttcaccatacctaatcttgagacaagcccgacacagaacaccattgctagagtgacaaactgaacaatccgtctttcctatgcacggctgattaacatcgagattaccacatcgcttgcagtcgttctcagcacataat

SEQ ID NO: 16874 - DNA, 541 bp, Gossypium hirsutum
  Clone ID: LIB3829-025-Q6-N6-A4
attctaaatcttgttcatacccttttagatgctgaaattgccattacattaattccaattcaaagttataaaaaagaaatcatacccaattcagcagcttgttaaatgaaacttcaagtacaccacataaatccatgaagtttgcaaaaacaatatccaatttcaagcctcaaaatggacacttgttttgttcaaatcacagaccctcgaaaaaacgaatgtggtcttcaaatgtctccccatgccggattctggtcacagatccatcttcttcgacccagtactcaggagggcgcattttgagattgtatgttgatgccatgctcatgcagtaagcacctgcatcatgcaccaccaggccggtccccttagctggggttggaagttctctctcttttcccaagaaatctgcagattcacagacaggaccgacaacatcaaaggtagagacctctgcatcaggaggtgtaggagaaaccagttctatgtgttggtaagcgtcataaagactaggacggataagttcagccatactgccatc

SEQ ID NO: 16875 - DNA, 547 bp, Gossypium hirsutum
  Clone ID: LIB3829-025-Q6-N6-A5
acaaagtaatttgacttactatatgatagatatataggaaaagttgtctattaagtttagcctacttgcacttagtaatcaaattatagaactgaaccaattgatgctcatctccaaaacatatttgaccatgatcgggtctgtgtttccacaccatgaaaactaaaatatcaatacataaaagctttatgaagagattgattttatcaaacaatgcgtgcatgcatggatgttacaaattaatacccaacaaagctaaatgcaagttcatattttcgaaagacttgttaaatcaaatcatccttggctttgcaacaatggttgaatgcttcagaatatgcagactgaactgtccacctttctccgatgtatcaagcttagactgcccctttggaggcaatagctcaaaattctgcaccaaacgtcccaatgtgatccctaggattggcagtgccaaaataatccctggacagctcctccttccaacaccaaatggaagatacctgaagtcattcccatttgcttctaccttcgattcctcctcgaa

SEQ ID NO: 16876 - DNA, 523 bp, Gossypium hirsutum
  Clone ID: LIB3829-025-Q6-N6-A7
catgcaattgaaatatataatatcttcatttccatgtataaaaatggatccgacatgaaacatgattacttaatttaaatccgaagattttggggcaagaaatccagcattaacgattaactagcaggtcatcagaagctgagacaaaacagtgtttcagctgaatattcaaagttgaaccagcttagatttttaagaacaataaagggataattaaatgcaatatcgaaaaagccagcttttgatgtccatccatggctctctacatcatctcacttcactatgcagatcttaataaccgaagcagccccgatacggtgcagtgcaacgatggcatcaccaggcttgcacaatcccttctccgtagctgacttcattgcagcttctaagatgacctcggtggattcggcatcagttgccttggctgacccttctgccaggatgggaaccaagcccctatatatcaaactgtgcctggctggaccttcgtcactgcaggtccaatcaaatgaatcggttgtca

SEQ ID NO: 16877 - DNA, 546 bp, Gossypium hirsutum
  Clone ID: LIB3829-025-Q6-N6-A8
acaactcaaaaaccctactgctgcataaaaacttgaaataacatattaaacccaccacaaaggagtgggcaaaactggattcaatggtcagatatgtttaagaacatttacttaagacgctagatagggagaaaaataagaaacttgccaaaacaacaaaacaccttgcctcaacaatcttcaaaaagggtgtctaatctcatcaaaggagatcagcaacgtttgatggcagctcctcaatgaccacattatagaacttttggatgtcaaaaagcatcctctcatcatctgtagtcacaaagttgatggccacaccttttctcccaaaccttccacttcgaccgatgcggtggaggtagttttctggttgtgtaggcagatcatagtttatgactagagagacttgctgcacgtcaatacctcgagcaaggagatcagtggtgatgagaacacgagatgaaccagagcggaattcacgcatgataacgtcgcgagtgttctggtccatgtctccatgggtggcagacactgtgtggtcacggcttc

SEQ ID NO: 16878 - DNA, 528 bp, Gossypium hirsutum
  Clone ID: LIB3829-025-Q6-N6-B1
atccaaatggattattatttataattaaaattgaccttttcgtccatttcacagaatatctcaaactaggatagttttcaaaatgacttttgcagcttacattacaggtaaccagactattagcatcctctatttccagacatgctaatgaaaatcactttgcattcttacaacaaatcaaaaattttctgatgaagttaaacaacacacacattatcaaccacatttggcttccaactccaggttaccagccttggttaataaagtgcgtaaccggattaagaaaatttgtagctactgatactagattataatgaaatttgatgataatcattttgttatttaggtcccttcctcttttctaccaatattgaattcctccttgaattgatctctctggcccaactctttccaatctctgtctgaaattttccttctgttgaaaggaaaaattcattcagcacctttccatgttcaagttcatattccagtgcttgcagaatcaattcaaccttgtcaaaatctttc

SEQ ID NO: 16879 - DNA, 222 bp, Gossypium hirsutum
  Clone ID: LIB3829-025-Q6-N6-B10
ccaataccaattcaatgaattggtacttttaacattaacaaagaaaacagtagataaactcgaaacatgttctcaatattgataagctcaaagcttcaaatattttataacaaagataatcatcaaaatagtgctaatgttgaaaaaaacaaaaccctaatttccattgaaacaaacaaaccaaccatcattagaaaaccctaacccaggctagtaattttc

SEQ ID NO: 16880 - DNA, 531 bp, Gossypium hirsutum
  Clone ID: LIB3829-025-Q6-N6-B11
gaaccaaatctctcaaagctgattgattgatttaattagcagaggcatattcaccatagcttttgaaactggccattccaaaaagaattacaaaaaccctaattgaaaccttgcttccaatactcctacttactatacagaagcagaatctaacctggcaatgaaggaaaacaatacaaaacaaaatatagcgcaccatgcgcgcaaataaacctggtaaatgagccttttacaaatgatcttcgcatgaagtcctccttgttcttggccttgctccgtcgagggagagctttccactgaactcatctaatgaatcactcgtgagcggtccactgtagctccgttgttgctctgcccagaaccggccactacggttaccaacatcataccctggcgacgtgtaattggtgttcatgagcacatcaccttccagtatgcggagcacctgtgacatgcgcggcctagaatgaggatctcgccttacgcataatgatgcagcatgaagcatggaatatacctcatgttcggaat

SEQ ID NO: 16881 - DNA, 481 bp, Gossypium hirsutum
  Clone ID: LIB3829-025-Q6-N6-B12
aagaaaagggcaaagttgcattcggctcaggattcaactcattcccaaaccctaacgtagcagtcaaattttacacacaaaatgggggttatgcgtttggaaacaaacacacatgttctcaaaaaaaatgaatgaggggggaacacataaagctcctatagattgggtacaaactcagcaaaaacaaaataagaccctcatctgaaaaatctgaagttgtcactccatcgacaatgcaataacctttccttcggaaaccaaccaaccaaccagatgatcatcacataatggggcaacgggtgcttccttctgctggttgcggagctgtctgctggtacctgtttgactcccaagggttgtaggtgaactcggacgtatccaaaccatacttttccctcattcgggcactccaagcattatttttgctgggtcgttgatcaaggctgccagtaacaggaacacctgtagctggaactggggg

SEQ ID NO: 16882 - DNA, 505 bp, Gossypium hirsutum
  Clone ID: LIB3829-025-Q6-N6-B2
agaacaaatttattcaatttttttactaaatctaattggggttttccaacagaaccgaagaaacaatgacagtataacagatgtacaacattagataagcttctcacaataataccaccaaaaaaaaaagacaatggatagtaaaaatgaatacaagtttttacctctgatgcagtttccggttttcccggttgcagatcaaaaaaacacttcgtatcaacaatgttttggctttccagcagcccgttttatatgtagtctcttatattctagtcgaattcttgtctttcttacatgactttgaatgtgaatgaccatcacctgacatgtgcttttttctcctaggagcaccaacggcagaagagtcgatcaaagggccagaccatgtctggattggtgctttatttgaatatgagaaacttgtactaaacggaacatcgggtggatcataaccaggatctatcggatgtgcagaacccaaaggataaccaagagttccatcttg

SEQ ID NO: 16883 - DNA, 480 bp, Gossypium hirsutum
  Clone ID: LIB3829-025-Q6-N6-B3
aaaaaaaaggaatttcaacagatcaaagcattggtttgcaaatttcttggcgatattccgaagtaagccggctttcattctctttatatacaaacagccgcgactatgtctatgccctcgaaaaaaaaaagaaccaaaaaaaaaaaccaaatgggaagttaattgctaagttctgtatgggttataaacaaatgggaatggggattttcctacaaaccccaatgcaaggccatagtagtatacattattaccacattcatgaagtaggaaactgtaatggcattaacaacctaggaccctcctcatcaggagccttatttttcagggaagccctggaatagtagcagcgatgtattcacaggatgtttttcaagcaactgctgctttggtttaagaacgggttttacattccgctccatttttggaaaagggaaaaaaagggaaagggaaagggaggcaaatacatcggcttcctcttgc

SEQ ID NO: 16884 - DNA, 482 bp, Gossypium hirsutum
  Clone ID: LIB3829-025-Q6-N6-B4
atggtctcagggaggcccctgagttgtaaataaataaaaaagttatacaaagggctaattgtataatgaacgaatacacatgccccggccggcaagtaaccacggtataaaataaactgggaagaactcatctaattgtataatttacaaaaggaaaaaaagaaagcaagattacagatcccttttgcacaatggacaagaaccatgactaacaagccacttatttatgcaagggagggggaacatgtggtggcactggggcaagctcctaactgtttttcccaactgaaagtcctgaaaacaaactgagcaggaaactttttccccggaagcatccgcattgttattgtttgggattatgaactttgggattttttcaaccaaatttccagccaatccttttgaaccaccaatgtcaaatatgttctggacatccttaaaagttgtttcaacagctcccatttgactttggactgcactca

SEQ ID NO: 16885 - DNA, 523 bp, Gossypium hirsutum
  Clone ID: LIB3829-025-Q6-N6-B6
gacaatctgacaacatcttcatcctgcaaggaatggccaaggccacagtgttgaggataatgccttgcacttgagccccagaccagaacatatttcacatcctttatcaaactcctatgaatgtgattgcagaaatcttccaccgaacagccacccctatcagcagatagaaccacaggatcactgaaatcaggttgctggccttgtggctttgtatatactctcacaaggcccatctcttcccacatctttgaaagtagtctatctaagttcagcttcaggttgcagctgattacaacagaattaggctgccgggctaacttatccacatcatcaataccaatgacatctatcttgttgtaaacatatacacatttgatgtatttgcggtttccttcgatgacatctataagatcatccactgttgcatcctcacgaaatagaacctctgcattgtgaattttgtattcatgtaggatttgataacagagtttttcatccacatgagttaaaggtaatgtac

SEQ ID NO: 16886 - DNA, 362 bp, Gossypium hirsutum
  Clone ID: LIB3829-025-Q6-N6-B9
gagtgacatcccagcatacttgccctcgaactaatggcttgcggcccaactcgacgttgcaaagactccacgcgatactgaccctctggaacaaacgaccagagtccattatgattacccatcttcatagttgcaaacatcaaaccggatgaactgacttgttgttacaatatgttgtcgagcccattaaccttttacagtataagatcgcttttccaatgcacaaccttacctttggtaaaaaacaccatgaaaattgactccatgtagaatcaatgaaacacccacacaatagtatacctataaattactaactatataaaaactgcataacttctttagtcttgtttactaccccacct

SEQ ID NO: 16887 - DNA, 545 bp, Gossypium hirsutum
  Clone ID: LIB3829-025-Q6-N6-C1
aaggatataaaatcattttttacatagaatattaagacattttatatagaatattaagaccggtatgtatgtttaaaattattattacccacaaccagcactaggaactaaacaaccaactttgttctgagttatataagaagcaaggctaaactaatcatccaggcacctacgtagaaacatatctcctgagaaatacacatattaatccatccaccaccaaattagtcacctagaatagtccagactttgacacctgctcctactataaggcgaccttgagtaggatcaccctctatatctcccatctctgggtgaaattaaccttgagtaatgccttttcctagaaggacaataataatctggactgcaggagaaacttcagtcctatcacggtgattgagaataatgaagcggggagtgcctatctgtccgactccttctgcgttctctttccctcatttttgaaggcttcttcctgttttcctcagcaaatgcaacagtaagttctgggccaagaacataaccatccgtatgatattttg

SEQ ID NO: 16888 - DNA, 476 bp, Gossypium hirsutum
  Clone ID: LIB3829-025-Q6-N6-C10
gggggggataacaaagagagcacatttataagccttttattgctcaaaaatgccttctgtgtttgcctgagatctcatgttaatttctcagcaaacaaattacagatggggccgtaccatgaactaaacattattttatgaagtttgtagcacaatttcaatggaaatctaatgaacatgtcccaccgggaacaaaaaaaaaaggtaaaacaaactgagagattgtattgaaaaacccacaacttatgcagctgcagtgatgtactggatggcctcctggcatatacccgtcattgtagcttcaggaccataaacctcaattgggatgccaatttcctttccaagtgcccgcatttttgcaagccccttctggtaattgggacctcctctccttacatatatgggcatgttggctgctttgagctttgattctttctccttcaaggctcgaattatgccattaaacgtggcaccca

SEQ ID NO: 16889 - DNA, 538 bp, Gossypium hirsutum
  Clone ID: LIB3829-025-Q6-N6-C12
gggagcaagaaatccagcattaacgattaactagcaagtcatcagaagctgagacaaaacagtgtttcagctgaatattcaaagttgaaccagcttagatttttaagaacaataaagggataattaaatgcaatatctaaaaagccagcttttgatcatcacttcactatgcagatcttaataaccgaagcagccccgatacggtgcagtgcaacgatggcatcaccaggcttgcacaaccccttctccgtagctgacttcattgctgcttctaagatgacctcggtggattcggcatcagttgccttggctgacccttctgccaggatgggaaccaagcccctatatatcagactgtgtctggctggaccttcgtcactgcaggtccaatcaaatgaatcggttgtcaagactgggacaaccacggataggataggaacagctggtctgtacttggcgaccaatttggctgtcgttccaccacgggttaagacaacgatgagtttagctttggccttgttagctgttcgtacagctg

SEQ ID NO: 16890 - DNA, 547 bp, Gossypium hirsutum
  Clone ID: LIB3829-025-Q6-N6-C2
tttttttttttttttttttttttttttttttttttttttttttttttttttttttttttttttttttttttttttttttttttttttttttttttttttttttttttttttttttttttttttttttttttttttttttttttttttttttttttttttttttttttttttttttaaaaaaaaaaaaaaaaaaaaaggggggaaaaaaaaaaaaaaagtttaaaaaaaaaaaaaaaaaaaaaaaaaaaaatttaaaaaaaaaaagggaaaaaagggaaaaattttaaaaaaagagaaaaaaaatttttttaaaaaaaaaaaaaaaaaaattttaaaaaaaaaaaaaaaaaaaaaatttaaaaaaagttttttttattgggaattaaaaaaagggggaaaaaaaaaagggggtttgagaggggagaaaaaaaaaaaaaaaaaaaaaattttttattttaaaaaaaaaaaaaaaaaggagagtatatttttttaaaaaaagggggaaagggggggaaaaaaaaaaaagaaaaaaaaggggttaatgggg

SEQ ID NO: 16891 - DNA, 505 bp, Gossypium hirsutum
  Clone ID: LIB3829-025-Q6-N6-C3
acccctgtcaagtcttctggattggattttttcaaagctctggtacaaaattacttctatttattaaatattagtttttagtcgagttttgattaatacacataaacaccatcaatcctgcacgtttttgggtttcttgtcgtcgttagtgtcgactgcgtccattaaagactccatcttatcttcaatttcttgcaccttgtcaatgaaatcaccggcgagatgtgcgttcttagctgttccctcggctaaatcctcaaccaattcaagagtagcccgaagttttccaccgtccggcagctgttcgccgacctgatctgctatctcctccactttccccgccacgttttccaccacatccgttatctgttcagctgtctctagcatgttatcagcctcatttttcagttttgaaaatggcccccatttgcttgttgtgaaggataggaaaagtggtactaacgttcccagagcccacagttgccaactggaaccggcaggaata

SEQ ID NO: 16892 - DNA, 151 bp, Gossypium hirsutum
  Clone ID: LIB3829-025-Q6-N6-C4
gcggggatcacattgtttatttatagcataaaaatacaaatataacattgacaaaagcattgtgaaatgcattaaaccttttggttttaatattcaaggcagtttaactaaatcataatctaaaaaaaaaaaaaaaaaaaaagggcgccgc

SEQ ID NO: 16893 - DNA, 555 bp, Gossypium hirsutum
  Clone ID: LIB3829-025-Q6-N6-C5
acataaatgattgcatcaaatattaatattccaaacaaggaaatagaggtttttgatttaaacccctcaattttttttgaacacaatcaaattgtcatgggaaaatagagaaggagcaaccgattcaattgtacaaatgtttcagtgaataaagaacagataaaaactagaaatcgagaaaggatccaatcagatagaccaatcagatagacctgcaaagtattacaggagattgccaaaattttacttctttgattacatctaagtagctttttgcttcggggccttcctccttagttgcctctttggcatcgagttcttcatccccacaaagaaaattaatgcaccacattgcgcaacacactgcaagaaatcaccaagcagaacagagtattggggttcattgggacgatagttgtagaagtcatagagaagtggtgtgctaaccaacaagtagacaaacaggagtaaggctccgaatccatggccaaatacaaacagaatagcacctagtcctttcaaaatgatggcagttgcgactaattgtctaacttc

SEQ ID NO: 16894 - DNA, 537 bp, Gossypium hirsutum
  Clone ID: LIB3829-025-Q6-N6-C6
ctatgtaaatcagttgcaagattatgggacttttgtttttattgaaagcccatatgaagacctgataaaacttgccaacttctaacaactacaagcatgaagataaatacaaccaccaagttaaaaaaaaaaaaaaaacataaggtttttagctaatgcatgtgtcggcaggccttagtggggattaccacttgtgacctgacctttgttactcaaaaccagattgaaacatcctgctttggcatggtatcgaccccaacagcttgtagatcttccttgtaatcaaaagaagccagatcgaacggagaaccaaacatcaactggaagctgttgttattgtggctagcctcgaacggagaattcaaacccttaaaacggtcaaattgaccttccccttgcataaacatctgatgattacgaggcatgctggactcctcgaagaaattcccctccatcatgactccttgatgaccgttgaagaattcatcttgttgaggttggcttttcgactggaggaggttttgaccttcagtacct

SEQ ID NO: 16895 - DNA, 547 bp, Gossypium hirsutum
  Clone ID: LIB3829-025-Q6-N6-C7
aaggatataaaatcattttttacatagaatattaagacattttatatagaatattaagaccggtatgtatgtttaaaattattattacccacaaccagcactaggaactaaacaaccaactttgttctgagttatataagaagcaaggctaaactaatcatccaggcacctacgtagaaacatatctcctgagaaatacacatattaatccatccaccaccaaattagtcacctagaatagtccagactttgacacctgctcctactataaggcgaccttgagtaggatcaccctctatatctcccatctctgggtgaaattaaccttgagtaatgccttttcctagaaggacaataataatctggactgcaggagaaacttcagtcctatcacggtgattgagaataatgaagcggggagtgcctatctgtccgactccttctgcgttctctttccctcatttttgaaggcttcttcctgttttcctcagcaaatgcaacagtaagttctgggccaagaacataaccatccgtatgatattttgca

SEQ ID NO: 16896 - DNA, 552 bp, Gossypium hirsutum
  Clone ID: LIB3829-025-Q6-N6-C8
gaaaatgatataataatgtgattattaatacttataataaagggttaaatcattcacttaaaaaaaaggataatacaattacaatagagttaaaaaaaaaatctaaccttctatcacaactcatcaaaaaaaatgatctagttgagaattaatcatacaatagctaacccggaattacaacaatcaaaggctcaagagaatgaatgaagattgatggacacaaaccctaaaagttaaaccagaagccttgggctttcaacttttagccctcattattgttaaattactcaaaaatcaaagaagcctggacctgcccgagaaaggagttctttgccagcatccttccccatcataaccatgtcttcaaaagcatatggaccttttctagatgtttcaagcacacgtgttccatcaggagaagctaccaatcctttaaatatgcaattaccatcctcgtcttttgaagcatagccagcgattggagtacggcaagatccgtccaatgtctctagaaaggccctctcacatgtaactgccaatcgtgtttcctcg

SEQ ID NO: 16897 - DNA, 546 bp, Gossypium hirsutum
  unsure (1)..(546): unsure at all n locations; Clone ID: LIB3829-025-Q6-N6-C9
acaaaactaattttttataacatgattgaaccaaaattatgattgtgttaaagcacgattataataatagaaacagaattcgaaaatttggatattaaaacctaaaaacaagacataataaaagtaagggaaagcccgtgactaggaccagcctccagtacaaagtaatatataactacaaaaattttactttcattattaatcagatatattctgcttttaatcaacaccaacactgtttcccaaaagttagaagaaaaagaccccacactttttacgaacatcgctcacgggcgacccccatcctcgaatttggcacantcgaaaaccaccctatggttctgctgctgcatattggcgatcacattcagcgctggtgccgatgccatcgcaagacatgtgatgctgcctgctgtgctgtggagcagtaggttctcttgtggcagtgtcacgttcatgcccgaaaacataaatgttatggtcggtgcattgattgggaccgagtaacatgtgtcgaacccacccagagatgtcacgttcgccacc

SEQ ID NO: 16898 - DNA, 517 bp, Gossypium hirsutum
  Clone ID: LIB3829-025-Q6-N6-D1
gagaaatggcagatctcgtctcatctcatgtcatcgattaaatactcgaaatcaggcttacaagttttataccaaagttttctaaatgctgttctaaaactgtctgatgatatgaaaaacagaatgaactaatgcttttaaccaagtcaaaacagcagatcatagcccttgaagaaactaccttacttcttatcttctttctcagcctcagcagccttcttcaatctggcaccgatatgtcgtgcattcgtacgttcgacacgaagcttgttgtaggccttgaatgacttcatctcctcggtgaccttcaccagctcaacagaaggcttctcacgggaaataggcatgtatggtccttgcatttgggttgcagttgcaagctcctcagcagtagaatcaccggccttagacttgcgagcacgtctagggaagacaacaagtttggccttgtaagtcttaagcctctgaacattggcttgaagaccttcaagagatcggttcttacgacggtgatcaa

SEQ ID NO: 16899 - DNA, 191 bp, Gossypium hirsutum
  unsure (1)..(191): unsure at all n locations; Clone ID: LIB3829-025-Q6-N6-D10
gaacgcagaacaaagcatctgaataaaacaaatgtaagaacacagaattgccctaaaatctaatcctctactcaacagctcccnaccatgaaaaaaaaaaaaaaaaaaaaaaaaaaaaaaaaaaaaaaaaaaaaaaaaaaaaaaaaaaaaaaaaaaaaaaaaaaaaaaaaaaaccggccccgggggtcaac

SEQ ID NO: 16900 - DNA, 475 bp, Gossypium hirsutum
  Clone ID: LIB3829-025-Q6-N6-D12
tttcttgtcccttgggggccagaggcccctaagatgggtatgcaatattgctacaggcgagtgcggaaatagtatcctcttatatggcttacaactggttatacttactgcaaagacataaatctggaaccactgcgtgggcaattcaatgacctttaccaatgtctgtagttcttcaaaaaaaaaaaaactagttgtgaatgaataaacagggatgaccgtgattctgaggcaaaatgagtttactaagggccgcttaaaccgcctttcttacctggttggctgggttttataccttgactgttgcattactggtctgaacactgaccaaacatttacttttgaagtaattaacattaccgcattatgagcactggactcctacagtgcggttagccagtgataacaccaaacctttacgccttttaggttcaaacatgagcggactgcatgattgaagtcttttttcggataa

SEQ ID NO: 16901 - DNA, 550 bp, Gossypium hirsutum
  Clone ID: LIB3829-025-Q6-N6-D2
aatagaaatttatttcattaacaaagcaagcttttacaagataatttattctctcagcatataatataaaactccatataaagaactcttttctcttttttttttttttgagagagagagagttctatataggcactcttgataaccgggaaaggtagcttaagtaggcacataatataacacatagtaggacaaaacattagagttttgatccttggatgggcaaatatacagcagcaacatttccttaagcatccaaatgaatcatgcatctcagacctataccctggagcatgtagtcgaatgccttgttaatatcggcaaaaggcacagagtgtgtgatgaacttgtccatatccagccccagctccttgttcaaatatttgtcgacaaccatgggaatatcagtgcgtggtttatagttgccataaaaagcacccttaagggtcctctcacttagtagattcattggatgagttttgaatgcatcgtctttctttggcacacccaccagcacacaaacaccccaaccatcatggacgcattcaaa

SEQ ID NO: 16902 - DNA, 524 bp, Gossypium hirsutum
  Clone ID: LIB3829-025-Q6-N6-D3
aagcaacccagaaatcaatacttatagatagtgactgctaaacagccttcaaaacgagtgcatatcggaacaaagttccgagttccatctcactttgtaaacactagaaactcaagctcttctataagagcaagatgattcaaaacaaggtccacaagtcttcataacatggcaataaggtcgtatataaaaacattggaaacatcttacataatcagaccataactaactcatcaaatactaaatgcggcaaagtagtactcgcttcacacagtaccaccggtttggtgaagcatagcatcgatctcatcaccatcctccatctcaagctcgtccggagtttgctcacctcgcaggcggcgaccatcgaacaagaaggcaatcgagttgaaatccacagattgtcggtcgcaatatgcattcatgagcttcttcaattgtgtgcttcttttgatcctgaagaaaacttcattcccgtcctggcctttgactttgaggttgatgtgagcggcggactgatcgcc

SEQ ID NO: 16903 - DNA, 512 bp, Gossypium hirsutum
  Clone ID: LIB3829-025-Q6-N6-D4
aaatcaataaacaaaaagtttaaaacacaaacagcccattttagtatccttttacaaaccaaatcattgcagtccaaaacctaaaattagtacatgaccctaaacccaaaattaaaatccaagacccaagtcacaaacccaataccccatagcccagttacatgacccatagcccaaaactaataaaactagtccaaattatatcagcccaagtggcccaagattcaaaaatagggcagaaccctagcaatctgtttgcgccgcagcagccccagcctccgtaccgcctccgtaccctccagcagccacgcccgcgccagcacagcctccgtacgatgccaacgcaccccgtacctgcgaagaacagacaaaccacagcagtagcaaatagaaaaacaaagaaaagttgtattttttattttttatgttttgatctttttgggattttggctataaagccctgtgtatttcgattgtaaagtctctctttttttgggggggacgagatacgc

SEQ ID NO: 16904 - DNA, 539 bp, Gossypium hirsutum
  Clone ID: LIB3829-025-Q6-N6-D6
atcaaactagcattctttgaaggaattcaactacaattgacacggcaaaaagcaaacacacaatccgtgggcagatgccagtctcaaccaaatgaacacatatcaaaattggtctaaaaaactgttaagtaccagactacatagaaaaccaaaatcaaaaggctttgatactatcaaatgcaatctcatttcttcttggcagcagatttggtgaccttagcaccggttggatccttcttctcaacgctcttgatgacaccaacagccacagtctgacgcatgtccctgacagcaaaccgtccaaggggtgggtactcagagaaagtctccacaaccataggcttggtgggaaccatctttatcatccctgcatcaccattcttcaagaacttgggctccttctcaagctcctttccagatcgcctgtcgatcttggtcagcaattcagaaaacttcacagcaatgtgggaggtatggcagtcaaggactggggcatatccgtttccaatctgcccagggtggttcatgatgatgacctg

SEQ ID NO: 16905 - DNA, 444 bp, Gossypium hirsutum
  Clone ID: LIB3829-025-Q6-N6-E1
ataccataaacaaattggtcaagttccaaagctaaatctttccatacactttatcagttcccaaagcagatagcactctaggagaaatggtctaagcaaacaaccatatccagaatggtattttcaaataatttttgttaaacaatcatacattccattccttaccgcctgccaccgatcattgctgagcgcattgcactctttgggcaccaccgggcatgtcatcatcttcctcataagcctcttgagctgcttgcgcctgcttcctacgcatctcttcctcgatgttgacatcatatagagttgtttcctcacactcatccagctccatgtctgtcagctggactgaggtcctcggaggtagcacagcctcgagtgccttgcactgctcgggggccaaagagtcgggaaaatcgacagtaaagtgaatgtatagtttacccc

SEQ ID NO: 16906 - DNA, 485 bp, Gossypium hirsutum
  Clone ID: LIB3829-025-Q6-N6-E10
aactgaagttatactttcatcaattatttaaattttttgctatgatttattctctgcattgacgcttcttgatgcagttgtttggtttcgtccaaagtacaaaatgcattcgtctttccaatggaacaagtagctagacgtgtgtgactagtacgagttgcaaaattttcagcgattctacagttgctcttattttagtcccctaatgcccaaagctgattcttggtggaaatgagcattgactacgagcattgacgacggctttatttcttcttgaataggaaaactgcaaccatccattcttctccattattgtatccaaagagttccgcaacagcaataaagaatgttctccaatacactgtccatttcacagcctgatccttgccatagggggactccattattggcttaatggaagccaagcttcggtccatcctcttcagccactcttcactaatttttgcataatgtttcccattcac

SEQ ID NO: 16907 - DNA, 533 bp, Gossypium hirsutum
  unsure (1)..(533): unsure at all n locations; Clone ID: LIB3829-025-Q6-N6-E11
ttttttttttttttttttttttttttttttttttttttttttttttttttttttttttttttttttttttttttttttttttttttttttttttttttttttttttaaaaaattgggtagggaaaaagggggggaagggggggggggggggaaataggtttttggggggggtaggggaagggaaaaatttggggtggttgaaaaagttttttagttaaagttaataaggaagaaaaatttattgggaaaaaaaataaaaaggaaaggggggataaaaaagatgggattggggggggggggtgaggaggggatttggtgaggggagggggtggggggggaggtttttttttgtggggggggattagagggggggggggggggggtaaaaattttttttggggggaaagttttaaaaggtgtgagatntaagggaaaaaggtgggggggggggagagggttaggggggggatgtgtagtaaaaatagatattagaaataaatttaattggagaggtgggggggttaaggggaggg

SEQ ID NO: 16908 - DNA, 51 bp, Gossypium hirsutum
  Clone ID: LIB3829-025-Q6-N6-E12
gtgggtttttttatttttttattttttgtttgtttttgtttgtttttgttt

SEQ ID NO: 16909 - DNA, 551 bp, Gossypium hirsutum
  Clone ID: LIB3829-025-Q6-N6-E2
agttaacttacctccattcattttcacaattaaaaacttaaaaaaaatacatatataatcacaaaatggtgattttttttttgtgatgtttattaactaaacctatttttcatcatataaaaacactaaaaagagagcttacgcataaagacaagaaagcaaacaaagaacaaacaaaacaaaataaagccaataagaaactaattgcaagcttcacgagcaattcccaagcgagaattgatcacatcaaagagaatcctatgattctgctgctgcaaattggctatcacattcatgatggcgttcacattgttggggaccggtgctatggccaagcatgcccgagacccggcactggtgtgcaagaagctgttttccattggcaatgtcatcgacaagccttcgaaatgtaatgttattaaaggtgcctcagcttctgctgtagcatcaaagcatgtatcaaatactccaattgttgtaaatggacctttcacatgcttcacaaactcatctcggattgccttgtaaatgggctggacgaatcgggttac

SEQ ID NO: 16910 - DNA, 310 bp, Gossypium hirsutum
  Clone ID: LIB3829-025-Q6-N6-E3
gactcaaatacatttcatcaaaacaataaaaattaacaacacagatgggggagcgaagtacattgtaaaaaccgtctgaaaaggactgaaatgaccttgcatgataagacagtatgggtgaaggcccccaaaactactaacaagaacattaagagacagacaccgaaaacaaaaaattgcagcaaaaaatatagcggcagaagctgagttattctcaaccttacagtttgtcctcgtactcaaaaaggggggtcatctgctccttcaatcccttccttttacggatctcaacaacatgggctgctgcttg

SEQ ID NO: 16911 - DNA, 466 bp, Gossypium hirsutum
  Clone ID: LIB3829-025-Q6-N6-E4
attacaaatgcatagataattatagtcaaataaacaagccaaagtgaacttgttatataaataaacacacaaataagaaaaatttacaatccaaatttacatacaatcaatcacatattttcaatcaaaattcttcacaaaatgcatcaaattcacaacacaaatcacacatgggctcgttaagcatcaaatgacaaatcaccaagtagtccccaaaaacaccattggctttttttttcttttttcttttaagttgaattttaaaaaaaaaataatcaccttaattttccattgcctcatcttcataatcttcatcattgtcatctgcaacagcatcttgatattgctgatactccgaaaccagatcattcatgttactttccgcttccgtaaactccatttcatccattccttcccctgtataccagtgcaaaaatgccttcctacggaacataacgggtgaatt

SEQ ID NO: 16912 - DNA, 536 bp, Gossypium hirsutum
  Clone ID: LIB3829-025-Q6-N6-E5
atactccgcaaataattccaacaacggataacaagtttcaacacaacgtctacttcaaggaatgcattcaccaaacatatctatggagcatccactaagaaagaaaagcaacagctacgaacaagaagatggggaatgtgagtttagaataaaattatcgaaaaaagcttgtctcggaaacctccccaaattcattccttaagccaactttagagagaaaacaaaacctaaaacatctgtgtcgttggcttcttcctatttttgcaatcatcatcagcttatgcatcagcaaatcctagctcagagagcttcaggtgagcttcagtgtaatcagcaaagaaagcatcctcatcagctgcatatttgtcaaccaatggacggaaaacagggtcggaaaggagaactttgtcagttggcaactgtaacaggccagccttctctccagtcaagagctccttgaagtaagagttgtcgaagataagagggttggtagtccatggtccctcaaatccagacctctccttgtggcaccttcc

SEQ ID NO: 16913 - DNA, 530 bp, Gossypium hirsutum
  Clone ID: LIB3829-025-Q6-N6-E6
aatataccatgatgataaaagtagttacattgccaaaacaagtacacataaatacatacatacatgcatgcaaaaaaaaaaagtgggcaaactctaattaacattataaagttcagctgtataaacgtagaaactatgcaaattaatattgacttgtcggcgaattgggggatcagcagagaggagaggagaggttcacatctcacacgtcgtaaggaggagcaaggctcctacctccaccctccttccccttctcgtatgcatctgatgttgaccttctccgaaaccgatacgactctctgcttcctccagaaaaaggagataccggaggagtcgattcggccggcgaaaccggaggcgatccgctctggtaacgcggcgattttacgatcataatcgtacgtgtcactttcgttgtttcctccggcgtctcatcattgtacgatctcacactcccgccatcggtttccttggaggagttagagcggaaagtgaaagtggagtgctttcggagcttgccgagaccatta

SEQ ID NO: 16914 - DNA, 483 bp, Gossypium hirsutum
  Clone ID: LIB3829-025-Q6-N6-E7
atcaaacacttctttcagctcttttttctggtttcacagaagcaggctgattcagtatttggacacttatattatacatcttccaaacttaacaatacaacattttttcaccaatatacagaaacatgaattctgccttctttttaattacaatttgggataattttcatgttccagccttcttatctttattcctattagccatttcactagcaatgcgacccctttttgcaaacgagggcacccgctcctgctgggagtgagctcaccagtgatgacgggcttgcacccaagctcgacgccttggcataacttgaaaaagccccggttccggatgcggggaaaaaggctccattcaacatcaaatccccttttgatctccaattccaatgcttccattgattttgcggcgcatcctcatgttttggcacctctttgttggctgcatcatttggggcaagaaatctattgccctggctggtg

SEQ ID NO: 16915 - DNA, 550 bp, Gossypium hirsutum
  Clone ID: LIB3829-025-Q6-N6-E8
gtcaaagaaaacaggcgcacggtattataatgtcattgtataagtctagttttacatgttccatccatttttgcccgtaacaaagaaagcaaagcacaataatgaaaataaagcttaatcacttccacagctttcgtaaggacatgtttttctcagtctccttcttcatcaccttcgccactgccatctcaaaatcttcctgtgttacgtggaccctcctttccctcaaagcaaacatccctgcttctgtgcaaaccgccttaagctccgcaccagaagcaccattcatcttctcagcaatcttctttaggtcaatcccccgcatcaaattcattcttctagaatgtatttttaagatgtcctgacgagactcctcgttcgggtttggaaattcaatcttcctgtcaattcggcctggcctaagaagagcttgatccaagatatcaattcgatttgtagccatcagaaccttgatcttgttagatgcttcaaatccatccagctggttgagaagctccaacatggtcctctgcacctcactgtcaccatt

SEQ ID NO: 16916 - DNA, 198 bp, Gossypium hirsutum
  Clone ID: LIB3829-025-Q6-N6-E9
caatcaaagggaatttaacatcatacaaaaattacaaactaaaggaataatctctagccttcggttctattattcctagggcaacttccaaggtatccagccccattggtgctggtgccttttgtaaattaaatgtgaataataataataataataataaaggtacaaacattgttcactatgaggctgacatattgg

SEQ ID NO: 16917 - DNA, 549 bp, Gossypium hirsutum
  Clone ID: LIB3829-025-Q6-N6-F1
gaattaaaatatatttttggaccaacactggcctttcacaaacagaacaaagcagaagctatcttacaagtttcttgatacaaaactaccttccctccagttggttcaaaatagtcggttaacacttaacagtcttgggttttttaagaagggaaaaaagctgtgtttagccacctgaataaacgaaacgaaatgaatcccatagaaaagaaaggaacctcagtcataaacacaaatatatacataaatataaagtgtatgtatatgatatgcaataagcatccttcaactctttagagttattccttcaaccagccacccaccctacacatagtagatttcttccacaactgtgttctcaatagtatgcttttcgaggattgttcaggggattgggtctgtatcgatagccaagcatcattcgcttcttgtattgctcgtatatatcatcatctggcgtcacttctccaggattatgagcaccgacccccaaattgttcatcttcacatcaccagccatgattggatctgcaatgcctttcctggaac

SEQ ID NO: 16918 - DNA, 535 bp, Gossypium hirsutum
  Clone ID: LIB3829-025-Q6-N6-F12
agataatatgtcgaggtctttcatcattcaaacacgcaccataaaagttcaacaagcaatgcactttacaaactaaaaagacatgctttgaaacagggactcgttcggactcatgactgatagaatcttaaagttcctcacaaacgctaggactaggaaggttttataacttaatgtagactaacaggtttatttgctacaaacaccgacaaatggttgtgcctacaatgggaatttctagttcttgcttatagcagtagccttacgcactggatacgacttttttcagtagaacaaaaacaggcttacatgatgatctcctacccactccagcatcatgtcatctctttcagaaataataatcttcggtgtgtgggaaaagatcatgtatgatggtagctagttccggttcctgcatttttccatggccctcggagcgagtccaatggcatcagagcttttcatgatcctcaaccttttgcaggtgtcagtgaacatctcccatggaacatcacccacaagcatccagtcacca

SEQ ID NO: 16919 - DNA, 482 bp, Gossypium hirsutum
  Clone ID: LIB3829-025-Q6-N6-F2
aagcaagcaaattattaaggtcatttattgacatttatagtaagggggaaagaggaacaaaatgcaaatatcatctgatcaaaaggaaagaccccaaaaaaaaatttaaaactttgaagagattactgaatccttagcttttcttttcaggagcagagaccttcttagctgttgcttgagaatacaagaaagttccaagaatggcaatcccagatccaagtgcattcaaaggcctcactggattcctaaacaccaaaacagttgacactataaccacaattctcttcatggtgttcccaactgaaaatgtcaaagggctaatctcatcaagtgcctgataagatgattggttgtataggtgataaaatatcccagagagcaaaacccaaatgtaaaaggttgaggctttccccactgtttggattgcttgctgatatccttgaacccattgggacccttcaacaagaaccgccactggaaac

SEQ ID NO: 16920 - DNA, 512 bp, Gossypium hirsutum
  Clone ID: LIB3829-025-Q6-N6-F3
gcctataatatttcatcattcagttcatttgctttcataaaactcaagacaatatttagaaagaaacttcaaagaaagaaaaatacaagtctgcaaatatccagaaatgcaacagcagttacagcaaaagtaaatgactaattctttcacatccaaaacaggaaaaaaaagcccagcaactgggagttgagattttgaattgccaaaatggcaataactttccttctccttagtcctcatattcgggttcctcttcttcttcttcggactcttcatcatcagctgttgcatcttggtactgctgatactctgagaccagatcattcatgttgctctcagcttcagtgaactccatctcatccatgccttcccctgtgtaccaatgcaagaaggccttcctcttaaacatagctgtgaactgctcactcacacgcctgaacatctcctgtatggatgttgaattgccaataaatgttgatgccatcttcagcccagtgggtgggatgtcacaa

SEQ ID NO: 16921 - DNA, 67 bp, Gossypium hirsutum
  unsure (1)..(67): unsure at all n locations; Clone ID: LIB3829-025-Q6-N6-F5
ggggggggggggggnggggggggnnggggggggggggggggagggggggggtgggggggggggggtg

SEQ ID NO: 16922 - DNA, 544 bp, Gossypium hirsutum
  unsure (1)..(544): unsure at all n locations; Clone ID: LIB3829-025-Q6-N6-F6
gttaaataaataataattaaatataaatattaacagtccaaagtccaaataattacaatagttcacgggccaataaccaatcaaagcccaattacaagaccagaacttaaaccttataacagtctattaacaggctttgacccaaattaaaacactaatacctagacccaataactaatgccccacaaccaatacccaatccccaaattaacccgagacccaaaatcacattggcccaaatggcccagaaattttagaaccctaggtttctttcccatgcgccgcaaccagccaagcttcagccctggcctccgtaccgcccagcagtcatgcccgcgccagcacacggccccgtacccgagcgcacacctgtacctgcgaagaaagggacaaaccacagcagcaaatgcatacaagaaaataacagacagaaaaaaatggaaaaattgnatattttatttttttttctcttcttctcttggctataaagcctgaagagaatcaattgtaaaagtttacgttaagagagaatacaaaaggctca

SEQ ID NO: 16923 - DNA, 459 bp, Gossypium hirsutum
  unsure (1)..(459): unsure at all n locations; Clone ID: LIB3829-025-Q6-N6-F9
aaattcttaaacattaggattcaatattaaaatctgagatttgatttttgatcatgataatcttagggataatttgcctgaatgcctaatggacccaagtggtacggcattatggaacccctgacgcatgtatcaatattgagcttgtattataacaactgtgccaactgacacacttcatctaggttttgggggccgggcgttatacatataattgactacttaattgtgcctgttttaactgttcctgcactgttcagggttctattaatgaattgtttatgccaaacaggaactgtttggtcccaatcaccatagcttggaggggaattttcagggatgccattctgtttttttatgactgagcttttgtgtcatgctcatncacatttgaattcttgtgcctgccaccaccaattgctttaaattatagtgcattcacttcatcaaatctattgt

SEQ ID NO: 16924 - DNA, 548 bp, Gossypium hirsutum
  Clone ID: LIB3829-025-Q6-N6-G1
accaaagggaagtaagcaaatttgacacacaatgtcatgtaattgtcctacatatgagatatgaccattattatctattttaaacagggccctatgactattttcagcccatgaaagaaaaaagaatagccaaaaatccaaaattcccaacttgtttaaaatacatgtgaatattataatgaaaacaaaaggcaaataaaagtaaatggtgaaaagtaatgaacttgagatcagagatttcatcaagcacatacctttttacctgaggataagaattcgatcgatgtgattggttccgctggctgctcaaaggttgagcaagattgaaggaaacatgcctcgagtatgcagagcttaatcatcgaatttgagaaggagaacagagcaaacctgatgcgtctgctccaatgacagcgagatcacagattgtacacaattgaccttcctgggtaggcacaaagcgagtagtacagtaagggcaagatacatctttctgtcctcggtaaattgggacgtaagttgccccgcatgtcacaaaaggtttcctg

SEQ ID NO: 16925 - DNA, 535 bp, Gossypium hirsutum
  Clone ID: LIB3829-025-Q6-N6-G10
gcatcacaacaatcaagtcatattcaaaagtatggcaaaaccaggtatgtaagagtctagttaaaataacacacccaacgtccgatgttatgaatatagcaatgaagatcaaatccagcatagttgatacaactctaataagttacgcactactccatgctaatttttatccaaacataagagtttcataggcatcttcagctccgcaatagcatcttaccagtgaaaagacaatagagcttcagatcaagacccggatacactcttgctcctgctcctgctcctgctcctgctcctgctcccacttggactcctgctaacactgcgtcttttgggactcttgctccttcctttttgacgagaaggcaaaggagacctggaccttgagggagatcttgacaaagagcgagaccttgatgcagagcgggaacgaggagaccttgatctagacttttcaggtgacttgcgcgaaggctttgcctttggagacttgctgcggctcttgctttggctatagctccgaccacggcttttg

SEQ ID NO: 16926 - DNA, 541 bp, Gossypium hirsutum
  Clone ID: LIB3829-025-Q6-N6-G11
ggattcaatttatacatttttttatctccgggtgaccaagggtctgattatacactgcaaacaattccagaaaattttcaatctctttccaacagaaattgcatatttcaaacacaaccacacttatggagggggttaatgaaaagacacaaatccacatcacgaattacccaagctggagttagaagggctgcttgagttcatatcaaattagtaattttagcttaggcttgggtctccttgaagctcttagccaaccagatggcagtttccctaggagaaactttctcagttccgaatggtttcaaaagcaccccaagctcgtcatacctttgatgttgtaagagtctcgcactgaactcaagcaacccttctaatgcctctgctcgctgccggtacgacgaggtgtcgaaccgccgctgtcgtgaatcagaagatgaatgagtggatgcagcagcatgatcatgttctgagccttcaccatcatctcgtccaactcctagactttggtcactgcaattggatgttgtgataactttgt

SEQ ID NO: 16927 - DNA, 556 bp, Gossypium hirsutum
  unsure (1)..(556): unsure at all n locations; Clone ID: LIB3829-025-Q6-N6-G12
tcgcgatctanaaccgaggttgcagaggagaagacggtaaagccatgaacgcccccgaccgctacgagagattcgtcgtccctgaggggactaaaaggtttcttacgagagagacaccaagatcataaatgcggcgaccttcaccatcgagagagaagaccacactattggcaacatccttcgaatgcaattgcacagagatgagaatgttttgtttgctggctacaagcttcctcaccctctgcagtacaaaatccttgttaggatccacacgaccagtcagtcttctccaatgcaagcatataatcaggctatcaatgacctggataaggaacttgatcatctgaagaatgcatttgaggttgaggtagaaaaacattcaaggggacttttaatgcctgtttgaggagctgttacctttccggtgcctttttggtctgactttaaaaagaaaagaaccgatatctttgagacatttttcttgtttttactgatgtgattcggtaaaagctgtaatgcttgttattgaggcttctgtaaggatatactgttctga

SEQ ID NO: 16928 - DNA, 539 bp, Gossypium hirsutum
  Clone ID: LIB3829-025-Q6-N6-G2
cacataactaaacttaatatccattgctatggttaaaactggaaatgcatgtgttaaaatatagacatcaaatacgagtactttgttacatcactacaaccgctgtaatactacccatcataagaagattactccataagcctctcctaaaaccaaggagatgatgatatgataggctcataacaactggctttcatatacataaggcagtagggatctatatatatgaatcaaataattttggaactgctttgttttactggaaaaatctgtcaatgcctgaggatgggtatccattggtaccctgagctcagcttatatttttctcttgggggcagtagctaaagctaaagaagctatagctgttggtgataaaactttcttgactagcagcttgcacttggcataatcacccattttttgtggttgcgctttcactttgaattgcctgcaaagtggaaccctgcatgaatcagggtgatcacaaatgggaggaaggagtcgaagaagctgtcacattcgattgcggtgagagcacc

SEQ ID NO: 16929 - DNA, 545 bp, Gossypium hirsutum
  Clone ID: LIB3829-025-Q6-N6-G3
gccaagtcttttcattattgatatgtttcacatgcatatgcaaggaaaggggcattacaagtagctggagactaacttcctttcattcataggcataggctcaaaatcagcttgcatattgggcaatcttactttcaagtgtatttttatcagccccaactaccttatcaacttcctttccatttcttataaagaagaaggtaggaacactgctaatgttccatcgcgctgccacatccctaccctcgtctatatccacttttaagaaaactacctttgcatattttgcagctaaactcgtatagagaggagaaatgaagcggcagggaccacaccatgttgcggtgaagtacaatatcgccagccgtgatgttcttgtagcagcatttaacttaatttccagctcactggtggaatgaacgccaataacctggccatctttaaaagcagataatgcttcctgatcttgtgcctcagctttcttctgttgcctctgacgttcactcctttttagttccctttctttccgcaggcgttcatattta

SEQ ID NO: 16930 - DNA, 512 bp, Gossypium hirsutum
  Clone ID: LIB3829-025-Q6-N6-G4
gaaggacatgaggtgatagaaattcataatcaaaatagatgacaaacgccacacggttttgccttcatttgtagagcatgaagttattcgaatattatcacaatagcacaacagtcaaacaccataatcattggggaagcgtcaaagcgcttcacttgagcagccccttagacttcaaatattccacggtttggtcgtagatttcctcgatcccatacttaaagctgaatccttcgctaataagcttctctgaggaaatgatcaacttgggtttggaggggaaatctccaaaatcggtagggactttgaagtcagggtatcttttgttgaggaactttgctagttctggcacactggtattgacagcactgcatatatatcgacccgatgcagattctttttcagccaaaaaaacatgggctcggcattcgtcttccacatgtgtgatagagatcgaacctgacagcatctgcattcctttcaaagcatttatgaggaattcattgcctgaa

SEQ ID NO: 16931 - DNA, 531 bp, Gossypium hirsutum
  Clone ID: LIB3829-025-Q6-N6-G5
caaaaaatcatctcttcatttgacccaaacatgattctttaccctgtaaagttacattctagcagacattgcttccagtatcttatgcaagcaagattacatccaagaagttaaaagaatcaaatataaaagaaattaactgaaacctacaaggattaactcaacttcaatcactgccgttcgtttggaagaatgcaaaatcagtttgctagttgctgcattcgctattgactatttagtgttgttggcttgttgctaacaagggtatggtttctgcttccgcatgtccagtacaaaataagcataaaatccagttgtggcaacgataaagacgccaatataagtgcacacggctgtagcacaaacatacaagtacctggaagaattagcaacattagttttaccacaaggtaattggaattctgatgaatcaaatactttgatggtttttttcatgaaataggtacgatgttttggaagaacaagaacaccagttattcatgcaatttgtcatcagtgcaatatacgagc

SEQ ID NO: 16932 - DNA, 535 bp, Gossypium hirsutum
  Clone ID: LIB3829-025-Q6-N6-G6
agcaaaccatttaacaagctctcatcttaatgtgtttcggaaccaaaggataataccacagtgacactccaaacaaatgcaatataaaacaaagcctatgcgtatgctctaccgattattacaaatctggctccaatatttttatcaacatcaatctagtaaaatgtaaatcaccttttgggacatggttgtagagttttgataacatcacatcatgagccacgggactgcaatgctccttggagatttttaactgcgctgtcgtagtgtacgaaccccatgaaccagaattcatggttgtcaaccgatataatctggatgtatttctcagctgggttggctttgctagctgatggattcactgccctcagctggtgtaatgggataaccaccttataatagctatattgagtctgatcaccaacttgataagccagaggactgtcactgcaaaaaccaagcttatgggttgacatatataaaactccaataacaggaccagcggaggtggacaagtagcaagcatatgtcttca

SEQ ID NO: 16933 - DNA, 533 bp, Gossypium hirsutum
  Clone ID: LIB3829-025-Q6-N6-G7
acaaaaatatcccacaaacttcaataaatgcaaacattaatcaaaataaacaagaaacccaaccctcaacatccccccaaaggaagacaacacatcaattgaatcacatttcaaataacaaataaacaaatagttcactaaaaatagtctcaagcaaacaacacaaaattgaaactctagtgttgcattcattgtagaagataatgcttggtgattcattctattcacattcaaccaaaaacccctaaagctacctactaactaagcactatcaataaactacaaacttaacaaataaagaactaagtgaaacaacattcaaagctaatacccatgatggtttcaatctaagaatcacgtaaacagagggagataaattaggggattcccttagggttttatgagtctaaactgttgacataatctaatcttcatcacctccagatgcctttgaggaagttccagctttcttaggaaggaggagattgtggatgttgggcatcacaccaccgttggcaatcgtgacatctcca

SEQ ID NO: 16934 - DNA, 543 bp, Gossypium hirsutum
  Clone ID: LIB3829-025-Q6-N6-G8
agataaataaataaacatttatttattaaatagtccattgaaagtccaggcctactgttgctacccaaagcccaaatacaaaaacccatatccgggtataacccaatagccaaaacaatacctaatacccctgagctaaacccaaacccaaataagacccgttacatccagcagcccgttagactcattatccctgctagcctaagtcagacctaacccattacattacagaccttggcccaaaacaaaacagcccaaaaggcctaacagacttaagagaaacagggaaaccctagggtttcctgaatactgtgacgccgcaaacgtttctgaaagcttcagggagtgtctgccaatccccaaatcgaggccaccgtttaatgagttgtcccaagggccttcaatgctcatcaacgccccgatcatcggtcgtcccttggtctggccccaaattacgtcatgaatgtcatgaccgtcaccaaggctccatcagcgccgtgatcagtgcacgcgtctacaccagcatggtcactgccggatccc

SEQ ID NO: 16935 - DNA, 532 bp, Gossypium hirsutum
  Clone ID: LIB3829-025-Q6-N6-G9
gcaaagtaacttattattgccataaatttaatataagttgatacatgaactgaataggcgttaagcttcccgcccacaccatcaaaggcttctagtctttaacaataaacacacaaattcataggattctaaaaaaggaaaaaagaagaagataaaactgcaagccaagtggagcacgaccaattacttaaaaggcatgtttgtttaactttaagcagcaacactatggagcacaacagtctcaacagtgaggccaggtccaaacccaaagagcactccccactccaatccttctcctgtggtctgaagcccatcttcccttgatttcttcctcatctcatccaaaataaatagaacacaagcacttgacatgttaccatactctgaaagaacgtgccttgtggctcgtagcttctctggcttcagtgctaatttggcttctacttgatctaatattgctggaccaccaggatgagcaatccaaaaaagggagttccaatcggatatgcccaatggttgaaatgcttctacc

SEQ ID NO: 16936 - DNA, 403 bp, Gossypium hirsutum
  unsure (1)..(403): unsure at all n locations; Clone ID: LIB3829-025-Q6-N6-H11
ctctanacggccgcgcctgtgggttttttttttttttttttttttgaagaaagagatgtttaattcgtttaaccatcacgaggctctggctaattccattgctcatcatccagcaacaaggtttaatttttggtccgtttttattttttttccttttttggggggggggggacgactgggcgcggaaagagttttcggttggcggggcattgaggtggnagagcccggatttgacatttgcaacttccatgcccgccgggcgaaagttgcggaagcgatgaccatgccagaagctccgagactctgtgttggatgctgctcccgtgactgctgtggttgccgtggaactgtttgcctcgtttggttgctctgtccggctgggcctcggtccctccctctgcgt

SEQ ID NO: 16937 - DNA, 546 bp, Gossypium hirsutum
  Clone ID: LIB3829-025-Q6-N6-H12
cctactacacttgcccttgggggccagtagcccctactgagggtcggcaatcgggcgacgggcgcgtgcgtcgcttctagcccggcttctgactaaaaggcggtcagtcataatacagcgcacggaagcttctcgccactgccttttgaaccgagcgcgatgaccaactgttcgactcaacggaaactatcgggctatgctgcaattactattgcgacgcggccatcacaagggaaaaactaacctggcttacgactgtctacacccagctcaagaaacctattgtttgttgaacaaagcatcgctagttgaaaacggatccacaaggatgccataagccgacatggtgggctcaagccgtaacgtagttatgaacactagtccttcacaacccatctatccctgtgcctactggaaaaacacctataccttccgatttaataggtcggattgaaatggatgacatacttatacattctttactcgccactggcactcataatgtaacgagctggataacttctggcccacacgacaaaattggtc

SEQ ID NO: 16938 - DNA, 532 bp, Gossypium hirsutum
  Clone ID: LIB3829-025-Q6-N6-H2
aaaaggaaatttcaaatgtggttaagaatatttacatgggttacattctgataaagtatcaaggagatgaaaataaaagattcaaggtaaggtcgcagctgatgacctttacaactcatctgaaaattatcccaactaataaccgggccatgtaagggtacatgtgcctgtcaaaagactatatcagtttctcccactcattaatttgctacgaaacatgcaactacagcatctcacatttttgtcaatatctactaaaacaattatcatgaaagataacagagtggctgaatgaaccagcttgcctgcatcatgacacaaaatagatgaagtttttttaccactgctgcatcaaatttggatccttcatgaccactacaattgctaggtaagaatgcggtgataatattttggttgtgtccagcttccacaaatcaggcaaggaaattgttccattcacacttttggtgggaaagtaggcaagaaatctttagattttggcaggggaagctcccggaaccaatcatgatta

SEQ ID NO: 16939 - DNA, 534 bp, Gossypium hirsutum
  Clone ID: LIB3829-025-Q6-N6-H6
aatgttactacacttgggatgggagcgttaactcatgatgtaagtgtaactctaactgaggccattttacaggttgatcgaaaggatgtgtctaggaagctaatataaagaaattagacccaaatactgatataaaagggccgccagcgccagctctgtttttgaactcagaaactgtaaaacgggacttaatgctctttcaggagtggcgatattatcaattcgatatgcgctgtcatcaacgggatggtatgcccttggcccttatctttgccattaacactgatccattctactcaagcttgttaattcccatatggatcgaaacacatcgctcactcttaatttattcagacatggcaggatctaggattagtgaacaagggctcagtgataccattagttgacatgtatatctccctctacttggctgcaactggcattttttttttcatcgtagcgttataaacttgcagtaatttgcacacccgttccaaaagtctgaatttgcactaataacaacattaggccaaa

SEQ ID NO: 16940 - DNA, 526 bp, Gossypium hirsutum
  Clone ID: LIB3829-025-Q6-N6-H9
agcaaatatgacaaggtctttcatcattcaaacacgcaccataaaagttcaacaagcaatgccctttacaaactaaaaagacatgctttgaaacagggactcgttcggactcatgactgatagaatcttaaagttactcacaaacgctaggactaggaaggttttataacttaatgtacactaacaggtttattcgctacaaacaccgacaatggttgtgcctacaatgggaatttctagttcttgcttatagcggcagccttacgcactggatacgacttttttcagtagaacaaaaacaggcttacatgatgatctcctacccactccagcatcatgtcatctctttcagaaataataatcttcggtgtgtgggaaaagatcatgtatgatggtagctagttccggttcctgcatttttccatggccctcggagcgagtccaatggcatcagagcttttcatgatcctcaaccttttgcaggtgtcagtgaacatctcccatggaacatcacccacaagcatcc

SEQ ID NO: 16941 - DNA, 86 bp, Gossypium hirsutum
  Clone ID: LIB3829-026-Q6-N6-A1
ctaaaacagggttcttaaaatttccaagacaaaacacataagattgtccaaacatagattggaacatcaaatccggaacccaaaac

SEQ ID NO: 16942 - DNA, 542 bp, Gossypium hirsutum
  Clone ID: LIB3829-026-Q6-N6-A10
aagtatctctaaatcatatatataactatcaatcagatgaaacatcatcacacaaaattttgcatgttccagattattatcacatatttcaccaggaatcaactacaattaatattaagatctagaagaaccaacccgagaaaagagaatttatgagattatatttgtataatttgtttctacagctactggcgtgacgggaaaataatgcacaaacctgtactacacttatcagttcaacttctgccttcatctttcttcaacaggaaaatataaacatggtaatgattcgaatccgaaggcacagcttgaaaagattcaaaagaagaaagtaaactccttatatatatgatgtaccatgaatggccatatatgctatttcgaaacatgcttaaacgaagaggaatctttctaatgtatacgagtcatctttctaaagcatatgatgactcattgccgatttgcaatgttgggaaagattttcattaccaattcgcataagaacgatttacctacatattgcatcattctactatctgtgc

SEQ ID NO: 16943 - DNA, 534 bp, Gossypium hirsutum
  Clone ID: LIB3829-026-Q6-N6-A11
gacaatggcataaaattatgattttgatgtaaagaatgaacaagaaaggtactaaactaagtgactaaagtagcataaatcatagatccgtcttcccgaaaatgaatccatttatgaatctatgttaagagctttacttcggcaaaaacatgtgagaactctatatcaacaagtactccttccgatacccacgcacaatgacaggcacacttgtgggagggatcatgccataatctgtgacaatcactgagatgtaatctgaaggagtggcatcatattttaaattaagaagttcaaggttttccttctgtttatcagtcaagttatccaaataattcacatccactcttcctgggacctttgatatggcatctggatcacctaactcattaaagcagattgaatcaagttgcaccctttcatgaaatttatatgcttcacagcagaccaaaactggaacacgaaatgcatgagcaaccatagcaacagatgcagttccaaccgtcgaatatacagtcccattagaaaatatag

SEQ ID NO: 16944 - DNA, 106 bp, Gossypium hirsutum
  Clone ID: LIB3829-026-Q6-N6-A12
ccaaaaaaatacgctaattttagtatttaattgcattcaattctaacatgttcaaatcaggatcgagcagatccatcttcaaaatacacacggaatcatataacag

SEQ ID NO: 16945 - DNA, 483 bp, Gossypium hirsutum
  Clone ID: LIB3829-026-Q6-N6-A2
gactataaagtaaccgattcaattatgtttaaacagaagagaacacagaacaacagtccgaaaacatctgataaacaaatcgaaccatgtcataggtaacaaatcctggtactactaccatgagttgaaagcaggtcactctagcagcaagcccctttcctacctcgacaagcccagtcttaaaagaatactcttccatccaattaactctcaacctgagggtcatctgcttttgattgctcacctccttcctctggcagatccgaggtccacaaggggaggttgtccctaaaaagctgcatgataagggggctatccttgtaagattcttcattaaggctatcaagctcggcaatagcctcatcaaatgcttgtttagccagatgacaagccctttcgggagaatttaatatctcatagtagaaaactgagaagttcaaagccaggccaagtctaattgggtgagttggaggcaaatctgag

SEQ ID NO: 16946 - DNA, 522 bp, Gossypium hirsutum
  Clone ID: LIB3829-026-Q6-N6-A3
atcaaaataaaagtaatatgactatttgtatccatctcctaatgaagtttgtcgtttggaggattattttattgtcaccattgcctccgcaaccaaaaaacaggggtgtacaacccttgagcaaacagtacgaaattggattacatgtccttaattcagcctgacctttctatagtagctataagccacagcaacggttgccacagctccaaccaccgctgctgctgtaagaacatcacgttgttcccatgatcctacccagcttgtcaaaccgcacagccccttttttccatgagcttctgttgtttcttcagttttctttgtttcacttacttccgagctagcagtcatgcaacagctagacccattagcaccctggcaacaaccgcccaaattttccctggtcttttgaacagttgactcttcaggcttctcatttttcttcacttctgtcccattcggaagcttctgttcccctgttccatcaccactttcagtagaaacccccatttgacccctcca

SEQ ID NO: 16947 - DNA, 535 bp, Gossypium hirsutum
  unsure (1)..(535): unsure at all n locations; Clone ID: LIB3829-026-Q6-N6-A4
gaagatataaattctctttatatagtcattattacaaataaagttacaanttgaaaattcaaccacgaagagacaataataaaggagaaagacaccataaacattaaatcataagcataagtggaacactgcactgcagcataataatatctcaaatctcatcttcaaagatcttcaaaaacaccaaaaatattaccatccatgtaattgttatctaccaagctcaccaaatagtagctgctctgaatctcttcgagcaaattcttagaaggatcaccatctgggtacaaggtggaccatgatcgagaccagatttcaaatgcttcgtccttccacaccacaaaactggcaggatccaccacagttggttggattatttctttagcagggaaggctccccaagttactgcattcacatctgtgaggccaatgtttgataacaaattcccctttttgttgacagcaacataggtcaatgatgaaaaggaattgcaatttttcactagtgcatctaatttatccagtgagcagaaaa

SEQ ID NO: 16948 - DNA, 510 bp, Gossypium hirsutum
  Clone ID: LIB3829-026-Q6-N6-A5
aatgggttaaatttctatttatataacacatcaaatacgattacactaaaacattaatccgaacgccatgtaaatatacagtgtcaagtctatcaattggggaactcagtttaggttttaggttagatcatgatgctagtcaagttgttttgtccagtcaaaagcttcccaatcacgaacaaaactggcaacagcctgcttttgttcctccacagattgatgcctccggcgggggtacatgtcctcctctggaagttgtaacatacctttaataacattgagaccaaggctgctcttgaactggctttcatcatcaattacatgcacaaaccctttgtttagaccgaattcaacatggaaatatgggaaatttttcgggattgaaccgtgcaatcccttctcactcgtgtctatcagcttctttgcattgggctggctccactcatcctcggcttcatcaattgcctttttaaaatacacaggagcctgttttgcaatttcccgtggcaa

SEQ ID NO: 16949 - DNA, 516 bp, Gossypium hirsutum
  Clone ID: LIB3829-026-Q6-N6-A6
aatgagaagaatctttaaacagattcatgaaattaaaggtgaaatcttttgccaaacttttaagttaagggattagcaaaagttttaaacaaaagcttttctcatcattttttgttaagctatggtttccaaatgttccctgaaaacttttaacatgtcagaaaatgtgacaattccgaccaaacgacaatcatcttctataacccaaacatagttaactctatgagaaatggcttggatcatcactgcaactaatgaactcttgggatggcacacaattgcctcagctgttctcaccatcctggctgaataactcattgacctactatatcttccggaccttggcaatggtgaggctgccatggattcttcatcagatgatgatgatgagaatccaccacatgacattgacatactgaaatgttcaagcattccattcaagtttctctccttcaaccttgatgaaacgacccgaacaaggtcttccagtggacctccgcagtcgatgtaggccat

SEQ ID NO: 16950 - DNA, 363 bp, Gossypium hirsutum
  Clone ID: LIB3829-026-Q6-N6-A7
aaaggaaaaacggaatcacaattttactagactttattttgggaattgggggtaatagaaaagggtctataatctctttattccaaaatttccccttcacaacttttagcccccccccttttctattaacccccaatttgagaattgggggtaaagggaaaagggtctattagcgctttatgccaatttttcccctgcacaacctttagcaccctttcttttttattttttcccccaaaaaactatgccactaagggcatggggtgtttttgggggtaaaggaactttatttgaggactgggcgtcacggaccattttctcttcttgggctggcccccaaaccacgggataaaatccaaaggg

SEQ ID NO: 16951 - DNA, 533 bp, Gossypium hirsutum
  Clone ID: LIB3829-026-Q6-N6-A8
acgaaaattcatactatcatatctatttccacaaaagaggtgcttggctcaagagtgagctacaaacatgagcgccacttgaaaataaatgagaaaaaaagaagctagcataaaccatcatacaaccgttacaatctgtgacaacagtaaccacagcttttatgaaaacgacagagaaagggaaaatggtcctaaagttctaagaaccaaagctttgttccacttttctctcaactttttcacttgtattccaaaatcatgttgttttcaggagccaagccaatgctggcccttagtatgttctccagcattgcacgctgcttggacagtgcgttcaccaccggtgtgcctggtggaacaagaggggctttggtgaggtaactgaggattgtagccacaggatggaaagtgtggaacttgccctctccatcagccttgaactggatcctggtgctaagttcagcaaggagaaccaaatctaggataatgggagcagccaacagggaatcctcacatgtgttgtgcaacacaat

SEQ ID NO: 16952 - DNA, 207 bp, Gossypium hirsutum
  unsure (1)..(207): unsure at all n locations; Clone ID: LIB3829-026-Q6-N6-A9
tcggcgaaccanatcttaatgaattcaanaagcactgttgcatccacagtttcctgccaatcgggnaaacaanaacgactttctcttctggattttggcctgcttgcttccaagtttcctcggaacccttgttgcatacgttaacttccagttgtttaaggccattgtacgggtgcccctcttcatctattcacatcttggaatctt

SEQ ID NO: 16953 - DNA, 563 bp, Gossypium hirsutum
  Clone ID: LIB3829-026-Q6-N6-B1
gatgaataaataaattggtaggtagaagaaattgtatttgcttggtagggatggtagcattaagcctatcataactatagctatatagctatataatagctgaggcaactaaatgttataggaacatcaatggttgtccactaagagaagataatccatggcagtgaaacaaatgcatttgatgaaataattctattgcttaccctaattattacaaaacataaactagcttaattcctcgtgtcggagttcaaagctaagagggtgcttagattcatcggactcacgtaatttgttgatccgcttacgatgttgtttacgatgatcccattagctctttccgatggatgaaatggatcccaaaaaacatattcatctcgatttgagcataaattcgaaaacacggtacataatccaataccattgtaaggtccttgcccacaacatgctatctttgatgttgtaaatccgtaggccccaggattggtaacgaaatcactggtttgtagttgtgtattagcagcaatgaagatatttgcaccatactcgctattgagtccatt

SEQ ID NO: 16954 - DNA, 569 bp, Gossypium hirsutum
  unsure (1)..(569): unsure at all n locations; Clone ID: LIB3829-026-Q6-N6-B10
atagtataaatccatcattatatttattattcaatcaaattacttngagaacgttattccaaataccactaatacagtattgtcttgtctttgatgccattataatcacttctcttgagctgattttggtggagttacatcatcaacatcaacgtccttgatcacatcattcagatccttcatggcaactgaaatatcatcttgtttgatctttcctttttcttttagcttatataagatcatatcagcagccccataaaccttgccatccttaatatcatcagctgcctccaggtctgtcttggctataatgttgttgctaattacctgtttcgccagtttctttgtttcgatatcggtgtatatctctgcaatgtagagaaatagctggcctacacaggaagttccggtcgaaatccaaaatacagcaaacatacgaccgaatggttcttggaaggtctcgtctccgaagcctgtggttgtcatggttgtaaatgcacagtagatggcatcggtgaagtccattccttcgacggtgagtagaacaaagatcccaatgacataatgcc

SEQ ID NO: 16955 - DNA, 298 bp, Gossypium hirsutum
  Clone ID: LIB3829-026-Q6-N6-B11
ataaaggaacttattagggaactgtaatgtaataattggaactgcaggatatagactaagccttaaggttccttcccacaccatcaaagacctctagcctttaacaataaacacacaaattcatgggatttaaacaatctaaaaaggaaaaaagaagaagataaaactgaaagccaaggggagaacgaccaattacttaaaaagcatgttggattaactaaacacaacaacactgtggggcacaacaggctgaacagtgggggcagattcaaacccaaaggcactaaccacagcaacc

SEQ ID NO: 16956 - DNA, 524 bp, Gossypium hirsutum
  Clone ID: LIB3829-026-Q6-N6-B2
ggagctaaaaccaaatccatacaaagactagcaaaaatttttcaacataaatcattttccaacattggaaagtgaatacaggtcaaatttgagttttatcaatatgcagccagggggtgatatatataggtacatcaatatcaacagccacaattaagtttttggctgagctctacagttgatatattaaaaagaaaaagaaaattaccagaaccagtctcagctaatttccacaagtcaatctttgacaaaagcctagatttggttttggttccccaccttctgtacagaacttttaatccccaaccacttttcttcaacctgtaaaaatgtaagagggaggggaaaatggcaaaagaatagctcttcttctaactatgggtttcttgggtgtaataaaatgtacagttctgtttacactagcaaatgttcattgtccggaactgcttaagtggactccagagattagtttggttttcaacttactttgcctccatttttgcacaatctactcacaaaaacac

SEQ ID NO: 16957 - DNA, 187 bp, Gossypium hirsutum
  Clone ID: LIB3829-026-Q6-N6-B3
gcgcagtaagataatgtctgaaatatctccagaaaaaaaacagcacttgatcattataaaagtactgcgcaaaataactagacaagaagcaccagagacaaaatgtcaacaacaagtctaacagcatgcttgcaacaagtacgatgtaatctgactgcattagaagtttcatatgacaaaacatagt

SEQ ID NO: 16958 - DNA, 576 bp, Gossypium hirsutum
  unsure (1)..(576): unsure at all n locations; Clone ID: LIB3829-026-Q6-N6-B4
tcgccttatgtggctcnctgagttattggtaaaaacggatacgacggagctaaagcagatctttggtcttgtggggtaatcctttacgtgcttctcgctgggttcttaccatttcaagatgataatatggtagccatgtacaggaagatttacagaggagatttcaagtgcccaccttggttttcccctgaagctcgtagattaattactaagcttttagatcccaacccaaatacccgaatcaccacttcaaaggtgatggactcgtcttggttcaagaaatcaatacccaagactattagaaccaaggaggagctagaatttgaagccttcaatggcgagaaatcatccaagcctgagactctgaacgctttccatatcatttccttatccgagggcttcgatttgtcaccgttgtttgaagagaagaagagagaagagaaagaggagctaagattcgctacaacaaggccagcgagcagtgtaatatcgagactggaagaggtggccaagtcgatgaagttcagcgtcaagaagagcgagtcaagtgtaagactgcagggtcaagaatgtgga

SEQ ID NO: 16959 - DNA, 542 bp, Gossypium hirsutum
  Clone ID: LIB3829-026-Q6-N6-B5
gttcaaataggcttacagaaatattatatatatagacatatgaagtgatcaaagttactgaaatatatatagaaggcaaaggtggagcctcaacattgcagattgtcagaaatagaaaccaagggttaaagcctcaaattcagaatacaaaaagtttcagacactgctccctaaggtgaggatgtccataaataactaaagaatcaatatacagcatctcctacactttaccttattatcatttgtcgtcttgatgaagatgctcagaatcaagacctagcaattgcattcatcaagcaatgttgattgtgaaggagacatagggataggtgtcggcatcacctcctaaaccagccattgctccgccttcatcttcagtcttccagtatgtgctgtttgtgctatcacataatccttcaaggatggaccgcactttcttctcaccctttgtagacggggacaaaacgcatgccaggaaacacggcggcagaccgtatcttagaatgctctctgcaaagatacgtacagcacaaaaatgcatc

SEQ ID NO: 16960 - DNA, 544 bp, Gossypium hirsutum
  Clone ID: LIB3829-026-Q6-N6-B8
ataccaaggtaaatttataaataaaaggaagtttttaggctataaaagtgcagcttcttttcactttgatgtgcctgaaatatacagcaggatctcgaaactaaagaagatgaaagcttctctaagacattaaatatgtgaaatgcaaaactaggaaggtgaactttattgacaatgcaactagtctcattatcggtaaactacactgattatgtgcccatgattaattgcctcgatctcatttagtttggggtcgcacgcatgcacaaaagagtgagttcttcctcttcttgatgtttcttacaccaccgtaaagatagtctcgcaataaaacagttgttttgtgttcggtgattttggttcgacctctactttctttttcatcgtcaagcttcaataagagaaattgaattttctgcacctccaactgcaagcgcccaatcttttctgacccttttcgagcttgttctgatattcgctgcctcctaccacttccgctcccatccgaatctattgcaggtttcccatcaagaagggaccgtga

SEQ ID NO: 16961 - DNA, 497 bp, Gossypium hirsutum
  Clone ID: LIB3829-026-Q6-N6-C1
catcaaagggcaagcacgatttttattgcatacagcccacgttaaaattatacattcttgatgaaagccgaaaagaaaggggggagcaaaaattaaccatatcacactgcagacaagtttttcgaatcacttccagttgttggcaacaatgtcagccaagtctacaactttttgagagtaaccccactcattgtcgtaccaagcaatcaccttaaccatgtcgtctcccatgaccatggggagggatgcatcaacgggggaggacacatcagagcacctgaaatcaactgaaacaaggggttcatcgcatacaaaaaggatacccttaagctccttctttgcactttctttgaaagcagcattcaccttttcagcgaaggtcttttttgagacctggacaactaagtcaacgaccgaaacatttggtgttggtacacccaaggcaatgccatttagtttgcctttgagagtagggagtacaagggccacagccttcg

SEQ ID NO: 16962 - DNA, 440 bp, Gossypium hirsutum
  Clone ID: LIB3829-026-Q6-N6-C10
tttttttttttttttttttttttttttttttttttttttttttttttttttttttttttttttttttttttatttttattttttttaatttttttttttttttattaaaaaataaatataaaaattaaattatttaaatagggggggggggaaaataaaaaaaaaataaagaaaagggaaccgttaaaaaaggaaaaaaaaaaaaaaggaaaacatttaaaaacgccaaaaaaaaaaaaggcgaaaaggggaaaaaaaaaaagaaaacaaagaaaaaaaaaggagaaaaaaggaaaggggaggacaaaaaaagaaaaggaaaggaaaaaaagagtcttgcgtaagaaaaaaaaaaagtagggggagaaggggggaaaaaaatataggcccaaaaaaaaaaaaaaaaaaaggggtaaggggggaacaatagtgggggggag

SEQ ID NO: 16963 - DNA, 528 bp, Gossypium hirsutum
  Clone ID: LIB3829-026-Q6-N6-C11
gataactctcattcttatataatcatcaacagcaataaccaaaaggacaagtgaagataaaaagaaaggaacaacacaccatcattgtaaacattctatgccaacaattatttaaagggaagaaggggcatgttgaggttgaacttgaaaaccaaattgattacagcacttatgagcttggtgtgaggtatctgtaacagaaataggaaccagcaaccaggagtggggcggcgaactcgacgactgcagcatatttaggcgtcaggtcatccttgataacgaatgcactcatctctttctttttgggctcctcggttgaaccaacctgttcattattctttaaagtgtgaccctggagaacaccaatctgatacttgaggagcaaattctgagccgacttgctatgtccgatatcgttgaattctttcgtcgcatccttccctgctgattccaacaacacctcttctcctcctggatgttcttccaggaactttgttacgttcagaactcggccatcgatgacaagcc

SEQ ID NO: 16964 - DNA, 123 bp, Gossypium hirsutum
  unsure (1)..(123): unsure at all n locations; Clone ID: LIB3829-026-Q6-N6-C12
ggacaatcatagtaatagnaaattatttcattaacaaagcaagcttttacaanataatttattctctcagcatataatataaaactccatataaagaactcttttctcttttttttttttttt

SEQ ID NO: 16965 - DNA, 480 bp, Gossypium hirsutum
  Clone ID: LIB3829-026-Q6-N6-C2
ggggaaactagggcctcccgggtatgaaaagggttaaagaggcgggggatttaatgaaatgcaaatcggggggcctgtttgaaatggaagaagggtataaaaaatggggccccggggggagtcaatctttggatatcaccccccaaattttgaagcttcatggcaatattctcggagccccgttcaatatgggcaatatcatgaatctgagggggtccttttgcaccccatcccgctaatataattgaaaccccccccctcaagtctcttgcaataaccccagagccctccaatgcacttccttcgtcaaaccccgaaaccagggcattgctccccctaacccgaattctcccccccagcttttgcagttcccttgcatgagtcataccggtggaaaacacggacccctccaccaagctggaaccagtgcatgtagggaaaagtgcccttgtttgagggtgcaaatctgttggaaaaccc

SEQ ID NO: 16966 - DNA, 444 bp, Gossypium hirsutum
  Clone ID: LIB3829-026-Q6-N6-C3
gaaaaggggaaaaatggggcaacaaaccaaaaatcccggggaaaaaaaaaaattgggggggggcaaactttttaaacgaaaaaaaaaaaggggaagggggggggccaaacccaaaaaaaaaggccccaacggggggggaaaaacggaaaacaaattccaaacccgacccccaaaaaaaaaaaggggtggctgggttgggtggaaaccgggggaataaaaagatttggaccaaaagggaaaggggaaccaccaaaaccccaaacccgaaaaaaggtaaaagggggcccaaacgggaacaaccccctttggggcggtgggaaaaaaaggccagggttttcggccccccccggggggaaaaaagggaaacccccaaaggggggcccagggaaaaaaagagccggggaggcaaaaaaagtttttaatggccggccaaagaaaaaggct

SEQ ID NO: 16967 - DNA, 552 bp, Gossypium hirsutum
  Clone ID: LIB3829-026-Q6-N6-C4
agagtagtagctaagcatgctcaacaaataaaatacaggccaaccattcaagaacgtagtaggtagacatgcttcctcctactagtactagtagaacaaaagacaaatagtggaagatttaatatatatgttcccaacaaagaaaaacaacaaatagtttaacctattttgtgtactatatagctaaataggaatagcacagagcggtatagctttcttgagagtcatgccaaactgttcttgcatgtccaagtcttgtggatggattccatgaggcagtttccaatcaaaggaatgaatcatagaagctaatatcagatgcaccatacgaactgcaagaggcaaacccgggcatatccttcgaccagctccaaatggtatatactcaaaataacgacctctgaaatctaagctggaatcaagaaatctctcagggcaaaacgaaaaagggtggttccagtaattggggtctcgggcaatagcccaagcattcaccagaagctgagtgttgttgggtatggtgtagccacatatttcgacatcatttttggc

SEQ ID NO: 16968 - DNA, 545 bp, Gossypium hirsutum
  Clone ID: LIB3829-026-Q6-N6-C5
acatacataaacttcgatcacttttattaattatggcacagaaacatacatgcatgacctccaatggcagatttaatgctactccttacattgtttcagaaaggttacaaactgcagttcggagcaagtgagaccagcaaaactagggcttggtaaaaataaaacaaaaacaactccaagagttgtcatggcagactacataaactgctgccatggccaaagcccgtgaaagctagacaccacactttgaactgccaaaagcgaaccataactacaatgactcgagatcttcaatccgccactgtaagaaaagaaaaagacccaaccatcacgtgtagaacatttgagttcaaaaacgtgggagactcggtaaaaccaactatgatggacgaaagacagtaacaaataacaaaaagcttagctcaagcagaaatgaacattgctcagcaaaaacaccagaaacccagcagactaaaacctttacgaggaaggaagaaaagattccctaaaatccggaacccagcagcgactatattctcagggaa

SEQ ID NO: 16969 - DNA, 531 bp, Gossypium hirsutum
  Clone ID: LIB3829-026-Q6-N6-C6
gtaaaaattaattagttcaatttccgaggaatttttgcgttgcatcaatttttatttattcaatcacttcgttcgtgatcttttctttttccagaaagaacaaacaaattgggatgacaacaaaatgaatcccaacatccccacctctacaccgagatagttatcaatcatcgtcaacctcatctagaggaaaccgcaggtgctttcctttcggtgttggcaatcccttgagtcgtatgatatcggatgaatcctccttctctgcacactcttcttcaatcttttcatcactgttgtatacaaatctagtgtgttttccttgaaacatctcttccatgctcatcttgcttaaaccttcacaaagctcatcaaccaatccatcatcatcatcacccatttcttctgcatcttcatggtaatcatctcccatttcttcaatagttgtttcctcatcttcatcatgggtgcttgcatttacttggattgaccaaacagatgaattatcatcatcaatggatgatgatgatgatg

SEQ ID NO: 16970 - DNA, 559 bp, Gossypium hirsutum
  Clone ID: LIB3829-026-Q6-N6-C7
aatagagaagaacaacataattaaaagtcatgggagaaacattcaatcccattacatatatccatacacaacatgttttttttagtttatttatacaacaatgctacagctgcagctacagctaccgcatggctgcgatcaaacactccctccggccataagtcaaacttctagtagccatatgtagttttcttcatcatcctcatgaactcttcaatacttacctccccgtcatgatctcggtctgcttcttcaatcatgtcctgaatatctttttcggagaagtgttcaccaagctcctttgcaatgcgtttaacgtcgtcagcagatatctttccattgttatcttgatcaatgatttggaatgctttcataagctcttctttagtgtccctctccccgatcttggcagtcatcatgtgaacaaattcatcaaagtcaatggcaccactgccatccttgtcaacatccgcaatcatttgattgatttgctcttctgtcatttcgaaaccaagagccctcatagcaacattcagctctttggcatcaatggtacctg

SEQ ID NO: 16971 - DNA, 547 bp, Gossypium hirsutum
  Clone ID: LIB3829-026-Q6-N6-C8
agaaatgacgagggaaaaaactgctatagcagatgaacatatagtttcatctaaagtattcatacatatcattgggggcccctttaaacaaaagttcattaaatattctgaaagcaaaacacacaaacaacttcataaattccatctggtttgaaggaagaatggaatgggcagatattcactcccatgagaaggagagtgtatggtgagcaccagttgcagaggaaccaaaatgttcattttggaacatttcatgcccttggaggtggctgttgttacctccaccatcggcgtccaaaatggaggtcccgattggctcacctcccattcctcctacatcattaaattgcaagtttgggatgacgaaggaagcagaggcaggttgcaccatggggctcaaacctatctcccgagtctcagccggttgcgatgacagaagagagagagcacgatcagagtcaatagcttgattcaactcatcggagaacattttccggctgttgtcaccactgcttgacgcctcgagaaacggttgacaaagggaacc

SEQ ID NO: 16972 - DNA, 84 bp, Gossypium hirsutum
  unsure (1)..(84): unsure at all n locations; Clone ID: LIB3829-026-Q6-N6-C9
ctgccanaaacccaaanaataaataaattaaaacttcaagtttaaaacccaaaaatcaacatgcnnnccaatggcattacaaca

SEQ ID NO: 16973 - DNA, 561 bp, Gossypium hirsutum
  Clone ID: LIB3829-026-Q6-N6-D1
agtcaaccatagtagttttgtattcatgctatttaattaggctcgaattgtacctgattcggccacatttaaatcacttatttaaaattttaaataagccgaccaacaagcttaaatatcaatttaatcattaaaaatataaaatttaacacttatatctaataagttaaaaacccacaccttaattacgccttcacaacactaaaccgtaagagtttatgtttccgatataacaccttaaacgtacactgatttgatgcgaaacgagaatgcgaacgaaacccaacttcactattgattcgagatgttcaaaccagcacctacatcatatttaatactcaaaagtcagtaaaaaaatccacattaaggccttagaacattttgacaaagcaacaactccaaacaaaatcaaaacagtgcaagatctcgcataaatctgcattttactctacccgttacccagatctgagttgtcgaatgatagggatcaattattcctaaataacacatgattaaatgcttattaaagtagggtaatacggattaaaaacttttggaaaa

SEQ ID NO: 16974 - DNA, 510 bp, Gossypium hirsutum
  Clone ID: LIB3829-026-Q6-N6-D10
atggttagaactaaaacatccataggaagaacaaacgtccaacaaaaagcgtacaacacaggcgcttctttagatatactacaggaaattccgcgaggaaatggggaactatcttaatatgggtggttcaggggattattctgttgattcaaataaaaccgaacaccgttcaccaaaagggcctgtaatggaggcacccgtgcagagatttcgaagctgcatctcgatcttgtttaaaaaagtggtcgcttcatcaaaaggccttgaaatatcagacttgtatttcaccaacatatcgcagtaagtttccatgaactcatcgagctcaggatcggctcccaagcaggttggcaggatatcccgcttgttaacatcggtctccatcagaatttcgtctaatatcctcgcaatctccggagtagctccgaccttctggcaatcaatataagcttcaagcaaacgaggataataagggtgagaagcgatttttgctttgatcacgtttgaaac

SEQ ID NO: 16975 - DNA, 539 bp, Gossypium hirsutum
  Clone ID: LIB3829-026-Q6-N6-D11
ccaataaaatcaagtagtaatagaacaaagagttaaattattgtttagccaacccataaaaatagaaaccattccatgataaaacaacaaacaattaaaacaaaaacatcaaaaaccacaaataatttatgtctttagcagagtactgaaaacaagagacaaaagcaataataaaaaggactaaattcttcagcaaccactttttttttctttgcttcaaacctcagcacttgacctccttcaatgcatatgcaaagtacaaaaatgttgggtcaacagcaccatccttgtagtaagcaaacaccaagcatccatcatcatgcatgctctctcctacgaaaaattgaaggtccttcaattttgaaagcaaaaacttggttgctccctcaatgtttttcttgaaggactcttgcttttccgcatccagttttggtgtcaagttcttgatgaacttcttgatgaacacgacaaactgcttcttgtcgaaagggggttgctcctgaagcctgaaagtgtcaacaatgtcaacaaccttcaca

SEQ ID NO: 16976 - DNA, 287 bp, Gossypium hirsutum
  Clone ID: LIB3829-026-Q6-N6-D12
attgttccgcctccatcaaaaaacagggggaattgtttttggccacaatgtgcgatggcggtattctcctatataccgaaacggggtgggaagtggatcaattggaaatttggtagaaggagagcacactacaaaccctgggcctgtttacccctttctaagccttgaacacaaatcctaaataggtcccaaaagcccgaaatgggatcacaaatataacatcctttttcttacgaaaaccctgaaacacgatgttgattaaaatcacacattttggcaatgaacaa

SEQ ID NO: 16977 - DNA, 495 bp, Gossypium hirsutum
  Clone ID: LIB3829-026-Q6-N6-D2
acatctaaagcactagaatattgcaaatcaaacaagaggtgatagagggtctcacacaaaggtaaaacgcggcttatcgtcgccttacttacaaaaactggtcagaacaatctgtccctaacaaaaaaacacagcagccaaggatgtggaataacaccaaacgtgccaaactatccatagcaggtaccccattcttggcttgcttcaaaaccgagtcaggcgcatatggtgggaaaggatttgacctaaagaattggggactctgtatgacaaaacattgcccgaacgtgatatacccaacgccttcatgtattgtaccgaataaaccacacattgtcacatcccatgggcccctatttccaagggtgtgaaacatacaaaaccttataaatccacatacacactggttcagcgcacaataaccgctgattctaagcgacctgaccttgcaaagcaagctattgacaggaaaaggaagaacttccactgttaact

SEQ ID NO: 16978 - DNA, 523 bp, Gossypium hirsutum
  Clone ID: LIB3829-026-Q6-N6-D4
caagggaaaataataataactatcatacaacataaaattccccagatgatatctatgaatagagctcttcatacactgaaactatattaccggggacaattattataaaactaaaagagagggtgaaaacttttagagtaagatgagaggtaaacgaaagcaaatatatcacacatccaaacgacggtccaattttaccaaggtcaacaggatcgcagtaaaacagggcccacagaggagctaagcatatcgctaagagctacctggacctcatttgaaccatgctcacaacttatcaagctcgcaagaagtgggaagaattgaaccaagttcttctcgaacaaggtgtctcccaaactacaaatggcctggagagtcgccacaatcagtggtgcacgggaagccaattctctccgtttcccagaaactgaaggaatcaaccactggctttgctcctccggagatgtttcaaaagtctgcccagaccgtgcagtttctatataaaacagaaatacctcctggc

SEQ ID NO: 16979 - DNA, 531 bp, Gossypium hirsutum
  Clone ID: LIB3829-026-Q6-N6-D5
caaaacaatccaatctgaacccagccgagcccgttggtttgccatttatgagctcattacaacattagttcctttcgcacagtaaaccttatttcaagacatggtaattttcatgttatactcgtattaattctattaccttatgctacaaaacataaatcttggcttgagaaatcagctcctccccccacagtgttgagaatcaatctctcttgattcatgtattaggaaaagaaagctgcctggactggttttgattatggagcagcagcctacgataccgatctatagcaagttctctttgcagcacggactatatcttcgacctgtggcacagccattctctcgagatttgctgcatatggcataggaacatcagctccggcgattctctcaaccggtgcatcgagatatgcaaaactttcctccacaatagatgcgcagatttcagcaccgacaccgtgctgtggaaacgcttcttcaactgttactaatctgttggttttcctgaccgaggcattgatcgtggat

SEQ ID NO: 16980 - DNA, 518 bp, Gossypium hirsutum
  Clone ID: LIB3829-026-Q6-N6-D6
gcaatgagaaaaaacttctgtgttatatctatatgaaggcaaataacaagaaaatagaaaataaaacctagcaccttatccttgaattttttggggggtgtcactaaagaccccaatccttaaagaaaagaacaaaaccccacggagtcagatacaacaacggaacataactcttatggtgaatatacaatcacttctcctttccatcctttaaataacccgctagcctctgcagaaaaaccaaagcaataacaaaatttccagttaaccaaccaaaaagaggtttagagtgttgaagcatataatatatatgcaagtgatacacatgtataactattcctattcagctttttataattaccaggcttcaaaaccctagtcaaatctaagaccttgatacctgaccttagcagaaaggaaagccaataggcaaccgcatgggaccatatcactttagaccattacctataggaaaacatgctaccaaacaacatcacaatgatcataaaacagtgcac

SEQ ID NO: 16981 - DNA, 517 bp, Gossypium hirsutum
  Clone ID: LIB3829-026-Q6-N6-D9
acaggaaacaactcaagagtatgatattaatattgagagactgtaaagatagaataatatagacgcatatgcgaccttgaccattaccagtaactataaaactaggataactccaacattgaatcgtgccgctgtggatacttaacattcatttttattcggtagacatgactatttcccttccataaactgatcccaacttccatgaccacacttcacttaatgcttttgcaggcagaggaagggctgatcttggaagggatgttgataccgcaacttgcctgggagtccggctgcaaagctatacctgatgccaaaaatgccggaggccacacttttgatgcatctgcaagctgtttgacggtctggagttgtaatggcggcaggagttgagagatctgatgccgttgcagaaagctgggggagcaaaaccagcaccattccctttcaagtaagcaatgcagggtgcgagggcgcttgtgatttgaccacaacttatggccccttgagccagggg

SEQ ID NO: 16982 - DNA, 536 bp, Gossypium hirsutum
  Clone ID: LIB3829-026-Q6-N6-E1
acttaacactgcttttcctctattccaaaataggatggcaaaaacatccaacaggtagagacagaattcttttacgcctttcttttttcaataaaacataaggtttaaatagaagctacaatccaacgtaaaaaccgtacaccaaaaattactatattatatagttgaacgccttaccacacatgcatgcaaaacggctttactcaaattcttccttactgacctccaaggcatgtatcatttgcgtctttattcttagcttctcggagctctctcttcacacctttagctttgttcggtaaagccatttttcctaccttatgttcaggaatgtagatctcgccaataggtccttgaattgtatctgagctaacggtattaacctttttcttacgctgaacgttagcaggtttcattgcttcgttcctcaagccctcgctaggtagaccatgactttcaaccaccaaatccatggaagggcctactttaacgagatgcatcctctgcactacagtgccggacttttttaagccaag

SEQ ID NO: 16983 - DNA, 493 bp, Gossypium hirsutum
  unsure (1)..(493): unsure at all n locations; Clone ID: LIB3829-026-Q6-N6-E10
aactggcattactattcatatatgtataaagaaaaaaagagtacactttgttatttacacaacttccttcataatccgaactgaaatctgtaatattagtagccggaagtttcttcttcggataacgaagaacgaactcaaacaatcatctattttcaatggtttttacaatggaagaatggaaggcgtagtaatatgtaagtgggaatcaatgaagaagaaaccacaaactgttaagactatgcattatatgtagcttcccttccgtttgacagagaatttattctcggaacaagcgtggctggatctcttgacaatacgatattccctttgtcatctgttttttcatactcttcgacacgagggttcatcacaattctgcgggacctccatcgtntgaatgttaaatcaacaccggaatagttcaaatggtctgtgatgctgctccccggcactgacctactgcagtctggatctttttcggaaccattac

SEQ ID NO: 16984 - DNA, 535 bp, Gossypium hirsutum
  Clone ID: LIB3829-026-Q6-N6-E11
aagttaaatttgaccttatgaatttaaataactactattacatgaatgtgataaatctcaacacactatcattagttacaattagcaactctgtgtcacaatgacaagaatacccccccatcaccccccccccaaaatatatatatgtaatttgactaatttttgtgctcctatacctaacatgattaacaatttggaactttaattcagagctggcaccagaaattctgccaaaaagaaccatttttgaatgaaacattcatcattgcatctcactaattacagacattgatgattcatggaggcatctcccatctaacaacagattctgagataaccatcttcagtcccaactagaaacagtcttgagaagggtattatacttatgctcgacagcaccgacacatttcgacttccatgatctgatgaatacagtttctgaggtataatccgatgttgcccatcctcatcagcggaattagctaacgaggaaagtccaatcttatttctagatattgaaataacatcctgtccc

SEQ ID NO: 16985 - DNA, 114 bp, Gossypium hirsutum
  unsure (1)..(114): unsure at all n locations; Clone ID: LIB3829-026-Q6-N6-E12
caacgaggtgcactgcacagtctaattttgtcatttacatccatttcatagnaaaactaanatacgtgnactaacaaaatgtctttttgcactatacaatttcctataaatggc

SEQ ID NO: 16986 - DNA, 525 bp, Gossypium hirsutum
  Clone ID: LIB3829-026-Q6-N6-E2
atacgggtgaacctcgcaacttgaagaaaatgttgcaatttcatgaaaccgttaaaattccatagaatttcattaatgatttgcagagactgcaaatacaacaaaatgaacaaaaaagtacagatttctaattctaggaatcaatcaactaaaaactaacagacctaagctctctctcctctaatcctcctagcaagttggatatctttaggcataatggtaaccctcttagcatgaatagcacatagattagtatcctcgaacagtccgacaaggtaagcttcagcagcctcttgaagagcagcaacggcactgctttggaacctcaaatcagtcttaaaatcttgagcgatttctctcacaagcctctggaacggaagctttcggatcaagagttcggtgctcttctggtacttcctgatttccctaagagctacagttcctggcctgaaacggtgaggcttcttcactcctccggtcgccggtgctgacttccgagcagctttagtggccagctgcttacgc

SEQ ID NO: 16987 - DNA, 67 bp, Gossypium hirsutum
  Clone ID: LIB3829-026-Q6-N6-E3
gaagctaattaaattaatggcagcagtataaaagctgtaagcagcgacactttcactcgctgcaaac

SEQ ID NO: 16988 - DNA, 531 bp, Gossypium hirsutum
  Clone ID: LIB3829-026-Q6-N6-E4
acagataaagcactagacaaaaaccaaacatttgaatcaaaacaaacatttacataaaaggatgaagatggaatggcaatttaagtaaacaaagtgtttgagcaagaaaataaacgactaaccttaataatagattcacatattttcagcttaatattgctgctaatttgcattcgcactaccagggaactgtgctggcaatgaacccttgtaagcatctgatacggcggcagcagtttccgagagactaaccctcatctctgaaattttggattcaacgtgttctttatattttgacactgaatcaacgaccataaagagttgacgtgcgtgtatctgaatttcctcttcactttgttggattgcttcttgcaacctcagttgcgaagcctttagaatctctgttgcttctctttccgtgatatctaacttatgcgtctcgaactggacgtcctcaaccattttcttggcttctgcagtagatctatgatcacagtcctgtatttcctttttgaacaaatttattggggc

SEQ ID NO: 16989 - DNA, 519 bp, Gossypium hirsutum
  Clone ID: LIB3829-026-Q6-N6-E5
gccccactcatccaccaaacaaatatattatataaataccttatgataccagctaagtttaaaaatcaagacaatggtgtcagacatagacaaaaccctgttagacacaaagacagacccaacagcaaagccatatttgaccaccttggaccaagagaacaagaagaagcaaactctaactgattataatcacaaactgaaaaaacaaaaaaacaatgttacagcaactttgagacttcaattctttgattttgaatgcttcacaagccaatcaatgactgcatcaatgttggtggaattcttgcatgaaatcatatagcaacacacttctctgtcagtaatggatttgagccccatttgctctgtcaaatcctctttagataaggcttctggtttgtcaatcttgtttccgagtaccagcacgggaataccattcagtgaggatttacttaacaggtcatggagttctcttctcgagacagataggttatcgttatcggcagcatccacaacataaac

SEQ ID NO: 16990 - DNA, 446 bp, Gossypium hirsutum
  Clone ID: LIB3829-026-Q6-N6-E7
ccaaacttagattcactcaacatcagacaggatacataaaaatcaacatgttaacattaaagcaacacataagagggattgtggggcgatgaaaagaaaagaatgcaagagaaaggacccaatcattgttccacaacaaagtgtttaaacataatcaaattcagggaaatcccattagacattattaatggagaaaatacaagctgaaagttcaagtagcagctaccagatccctgggtttctcaattttcttctcaagaacattcttttgggctccaaccaccctatccacttccttccctttttttaacaacacgaaagttggcattccttgaaccccaaattcctgcgccacattaggcagttcattaacatcaagttttacaaactgaacttcagtaaacttagcagccatgccattcaaaacagggtccatgaatttacat

SEQ ID NO: 16991 - DNA, 536 bp, Gossypium hirsutum
  Clone ID: LIB3829-026-Q6-N6-E8
ctgtcaatatatttttcaactgatcaaaattctgttggcacttgtctgattaaacaaactcaacatttttcagtaacaatctaatcagcggtgaagaaactatagagaaattcttaataaaatgacaatagtaacctgctaagcccagaaaacttctcacatctgaaacatttttcggagctttccaattagcaatgtcagaaactttactcggattgatacagatcccatccgaaaaaaatatgtgaccatgaaatccaacctcgggaacccaaaattacgtatgctaccctagcatgtttctgtctgcctccttggcaagtctaggttttcaaaagtttcttggtttgacggctaccatctaaagggtctaaaataattctcttaatctgtttctcatgtaattgtccatggagtcagatttcgccgggctgtctattgatgatgaaaaagaataaatcctggaaaagtgtatggtctgcgaaaggtctgcttgaaaaaggtcttcgctggagggtggggagaggtgataaaat

SEQ ID NO: 16992 - DNA, 562 bp, Gossypium hirsutum
  Clone ID: LIB3829-026-Q6-N6-F1
ctctatcaaccaataggggcaaagatattttaaaaggggaaaaagaaaacctacataacaattgtctcttcactgatcacaatacatccttgaactatcagttacaaacatcatcaacaaaaatactaaaattaaagataacaatctcacataactcgaacccagacctggagattagcccacgaaaataaccaaaactaccacaattaactgatttcgtgttcgagctaaactttaaaagcaatagagatttaaaccgatacttgatagagacatacttgattaaggcactcaccagagcttcttttgcatggtgaaacaaagcatatgcagagggtagattgcggaaaatagcaagcgttcaagatgttgggggccaactcctgatccaatcagttaaacttgaaacatttcttgtgatgtcgtcgatattattactcttcaaagcttttacaatatcttccgagtaactttcttttgcttcctctagcagtacttggaagatttcacactctatgttgtttgaaagcttagcaccttcataacctcttttactcaaccg

SEQ ID NO: 16993 - DNA, 558 bp, Gossypium hirsutum
  Clone ID: LIB3829-026-Q6-N6-F10
gaaaacatatttatatttatacataatcaaaacaaaaggaggagcaaaaaaatgaaagaaccctatagtgaattaacatagcagaccttaatgagactcgcaaaacccaccaaacatctgttaagcaaatataaagcgtcaaaagggaacgactctaatgatatgataagggcagttgagacttgaaaatgatgtaaaggcaaagggagcaaggtgagcaaatggtgaatgaacgaacgaaagaggggatactgaatggctaataaaatgtggagatggagggacggagatcaaactcctgggtccaagcggtccggtcttgaacgtgcaagcaccatgaggattgagccaacgcgtatggatccattatcatccatgacccgaccttctctcctactctgccgctttgctgatgattcccaacacaaccctctgtgcgatgctgctgcccccctgggtgaaccaatgacttcgacaatgataacatgggcaacatgaacacccagaggctggaactctcttgccatgcattgcgataatgctctcaggacaaacttt

SEQ ID NO: 16994 - DNA, 539 bp, Gossypium hirsutum
  Clone ID: LIB3829-026-Q6-N6-F11
agagaaaaataaataaaatatataactaatcataataattataataacaatcgagagtaagctatcatcaaatctcaaccgtcaaaatagcaacacgctatagtgatataaaatcatcatcaccgtcaaaatataaataaaaataaataaaaacaaaagaaatacactactaaaaatgagaaattaacaatgagcctaaaataaaaatcatcaaatccaaatcctgtcctcccccgaaagtcagatctaaatcaacaaagcagcaaaaacgactgcaacggcagatccagcgacggtgactctgttccaagcggctgcactcgtaggagaagtgggagagctgcctggtgtctcgctgatggagttcgtgggagaatcagcggtagggggagagccagcgggagaaccagcgagaggagctgggggagaagtagtgggagaggaagttggtgaagattcaggggctgaagacgggggagtggatgttgacggcggagatgcggttggtgtagcggttggagacatggttggagaaacct

SEQ ID NO: 16995 - DNA, 538 bp, Gossypium hirsutum
  Clone ID: LIB3829-026-Q6-N6-F2
tttttttttttttttttttttttttttttttttttttttttttttttttttttttttttttttttttttttttttttttttttttttttttttttttaaaaaacaaaaaaaaaaaattaattttaaaagagggggggaaaagggaaaacccaaaggggaaaaaactggaaaaaaacaacacgtttaaaaaaaaaaaaggggaacccaaaaaatgagggaaaaaaaaaaaaaaaaaaaaaaaaaaaggggggaaccccatggggggttggggggtccaattctctcaaaaaaaggggaaatctggggggggattttaagttaaatttggaagaaaaaacccggggaagggccaaaaacctaaaggcctccaatttaattccttcccctttccttggtccccggaaaaaaaagggggaaaagcttttggggaaatcccttttcaaatttttgggactgggccgggaaaaccccaaggaaacttcccacttttttccgggcttaatgggcctggtttggaaaaaaaagggcttggggtacc

SEQ ID NO: 16996 - DNA, 516 bp, Gossypium hirsutum
  Clone ID: LIB3829-026-Q6-N6-F3
ttttttttttttttttttttttttttttttttttttttttttttttttttttttttttttttttttttttttaattttttttttttttaatttaaaaaaaaaaaaaaaggggggcccccccaaaacgaaaaaaaaaacaaaaaaaaaaaaaaaaaaaaaaaaaaaaaaaaaaaaaaaaaaaaaaaaaaaaaaaaaaaaaaaaaaaaaaaaaaaaaaaaaaaaaaaaaaaaaaaaaaaaaaaaaaaaaaaaaaaaaaaaaaaacggcaaaaaaaaaaatttttaaaaaaaaaaaaaaaaaaaaaaaaatttggaaaaaaaaaaaaaaaaaaaaacccagggttgaaaaaaaaaaaaaaacaaaaaggggaagttaaaggaaaaaaaaaaaaaaaaaaaaaaaaaaggaaaaaaaaatttttttttaaaagtaaaaaggggggcttaaaaaaaaaaaaaaaaagggggtcccccggtaaaaaaaaaaaaaaaaagggggtttaaaaaaaccggggggg

SEQ ID NO: 16997 - DNA, 545 bp, Gossypium hirsutum
  Clone ID: LIB3829-026-Q6-N6-F4
gaatctgaatagcattcatatatcagatgaaattatggagtagaatgaaatccatgtcaaactttttagtacaactaagaaggggaaagaggaggaataaaaaaaacgagagaatagggtcttgacattgatgacaaccccaactgcagaaacctattaggaaatagaaatgcttgctatccattgtaaaaatttttggacaccgtactaaatagtcaaaggtttcgagtctcgattaaaaccagcatggggatttaatatcaagaaaagactgcaaggcccaactaagtgcttacgggctcagataaccagctcacatctgtatttttacttggtcatttatatggtatctcccattcggatcatgatgactccatgcacttgactggcgaatagcaggctctgcaaagtattcgaaaagcagtttaatgggttgctgaagcagcagcagcagcagaactgcccaatcccatcttctgccccaacagtgagagttgctcaacaaattccattccagttaaaatttctgttgttccatatatgac

SEQ ID NO: 16998 - DNA, 532 bp, Gossypium hirsutum
  Clone ID: LIB3829-026-Q6-N6-F5
gaagcataaaagggaactaagctcttgcttaaaacaagtaccaccatcttcaaataagtcccaatatgtttgtgcaaaacacaattacacaagtgccacagaaaataaaaagagagatcaggtccacacatcataaactaatctgcatctttcaaacatctgactcgcaaagcacccataaagatgggtgattttgtcatattacacaacatttttacaagagtgcatcaaacagtggctgcgttctcttcactttcaaacattcgaaccacctctgccaccccctcggcgatttccttctggatgacactatctggcatgtcaaatgtcctcctcattgaaagtgatctcccttggggctgaggatccaccacatcaagcatcgcttccagttcgtctaccattgacttcttagcagctcgcaccattagatcagctccctcaatggcatcaacagtaaggagcagcacaatgattttctcacagaacctttggcgttctactgcatcctgggctactcgacgacgatagg

SEQ ID NO: 16999 - DNA, 551 bp, Gossypium hirsutum
  Clone ID: LIB3829-026-Q6-N6-F7
actaaggatagtgttcataagctgacagtgcatgaaattacaacccaaacacccaattatttaccatcacgaagcttggcaaaatcaagttgtaaaagccctcacaaagaggcaattgcattgaatctccttaaacatattccaactagctcctaacattttcctttagaaaaaaaaaacacaaacaacgatttgaagcggcaaatgttgtatttatagcaagagcaaaaacccttggaccatccatccttcctgttagttctgctgtttgcccttcacaaggaaatgataggtatagagtggagaggttcagtttcaaggtataatctccaaacaagctatgcttcttccacagttactccgggaaagggttgatcccaatcagttgatcacaatcaattctcagtcaggcctctcacaagcaccatatcaacactttaatattacaatttgcaattatgatgctagaagtagcttttgagagaaatgagatggagagtttgggaaatcataagtatacgagtaggcatcatttcagccttatacgatcc

SEQ ID NO: 17000 - DNA, 512 bp, Gossypium hirsutum
  unsure (1)..(512): unsure at all n locations; Clone ID: LIB3829-026-Q6-N6-F9
gaacatcgaagttgacgattcataatagcgtccaaagacaaacttaaaatattaaaacaaanatctaatagcagtaacccatgaaagttcgaaaaccacatagctaataataatcccagataagcttccagacacattatttaaaaccaaaaaaggccaccaacaacggcaaacaatccttacctagaaaccaccgcgaaggcgaaggacaagatgcagagtagactccttttggatattataatcagccaatgtcctgccatcttcaagttgcttgccagcaaatatgagcctttgctggtctggtgggatcccttccttgtcttgaatctttgccttaagattgtcaatggtgtctgaactttcaacctctagagtgatagtctttccagtaagagtcttaacaaagatctgcatcccaccacgcagccgcaacaccaaatgaagggtagactccttttggatattgtagtcggccaatgtcctaccatcttcgagctgcttgccagcaa

SEQ ID NO: 17001 - DNA, 453 bp, Gossypium hirsutum
  Clone ID: LIB3829-026-Q6-N6-G1
aatgtaaaaggtctataattttcgttaaaaaatatgaagaatctgcaattagacagcattagtatgcatattccatggaagacggggtcaattgagtatgctaacttgctacaaacccgtccaattgctacctcataactagactttttgcatttatgatctacataataaatacctaacaggagttgccataaggattgtgaaaaccaaattttgcccgggcccattacaataatagacaaaaaatataaagcccaaattttgtaaaaccaaccttaatacccaatcagctaaacccaaactaaaacaagcccaaaatggcccaaacctaaaatagtttcagcatccaagaaaccctagcagcagtatgtgccgctccccacgtgcctggtcagcacgtccaacgctcgaggctcaacaactccctggccccgtcccatcacctgcacctcc

SEQ ID NO: 17002 - DNA, 554 bp, Gossypium hirsutum
  unsure (1)..(554): unsure at all n locations; Clone ID: LIB3829-026-Q6-N6-G10
ggaaaatcatagtaataggaatttatttcattaacaaagcaagcttttacaagataatttattctctcatcacataatataaaactccatataaagaactctcttttttttttttagagagagagagttctatatgggcactcttgataaccgggaaaggtagcttaagtaggcacataaatataacacatagtaggacaaaacattagagttttgatccttggttgggcaaatatacagcagcaacactctcttaagcatccaaatgaatcatgcatctcagacctataccctggagcatgtagtcgaatgccttgtttatatcggcaaaaggcacagagtgtgtgatgaacttgtccatatccagccccagctccttgttcaaatatttgtcgacaaccataggaatatcagtgcgtggtttatagttgccataaaaagcacccttaagggtcctctcacttagtagattcattggatgagttttgaatgcatcgtctttctttggcacacccaccagcacacaaacaccccaaccatcatggnacgcattc

SEQ ID NO: 17003 - DNA, 543 bp, Gossypium hirsutum
  Clone ID: LIB3829-026-Q6-N6-G11
aaataatctagttattgaaacgattattacatatttagttacaaagaaagattcgggtacagtggctaagcaactaacgctatgttggagaatgaactaatatttatgaaattgaattccatactgctagaaagaacacaagcaaagagtaatgaacaagtataaccggttttgtaattaatcattgcatgttgcaagcactgaaagggccaaattcacgtgcatcgccattggaaagttaaagtggctttgcaccaccattttcatggatgctattcaccggagttgagcttccacttctcttgctggaatgccccgtaaaggtcctgcccatgaattttccagctttgctcagtccactcccaacagctccaaggccgctcccaacaatcccaactccagcaccaacaccacttcccacgagtccaactccagcaccgataccggtaccaaccattccaactccagatccaaccaacgaggctgctccatcaagtgcatccattgtgcttcctataactccagcttctttcaatttctttc

SEQ ID NO: 17004 - DNA, 390 bp, Gossypium hirsutum
  Clone ID: LIB3829-026-Q6-N6-G12
aaaaaaaaagattttttttttggccccaaaaaaggttttttccccgggaagggaaaatttaaaaaaaaatgggttccaattttttgggggggggggattccccccaaagggggaaaaaaatcaaattaaaaaaaaattacggggaaccccccggggggaaaccaaatttaaaacccgggggggggggggaaaaaaaaaaaaaaaaagggggggggggggggattccctaaaaaaaaaaaaaggggggggggttgggaaaaaaaagggggggggttttgtttcccgggggcccaaaaaaaaaaaggcaaaaaccccggggggggccaaaaaaaaaccccaaataaagggcccccgggggggaaaaaaaaaaaaaaagtcgggggggaaaaa

SEQ ID NO: 17005 - DNA, 528 bp, Gossypium hirsutum
  Clone ID: LIB3829-026-Q6-N6-G2
gacatgaagacttgatgatgatatcatttaaattttgcttgaagggcttaacaattggtagtaaggagccatccattgccctacaaattatcctcaatatcaatgtgaagtttctttatttccttataattttacacactggtttcatcgcttaatgttttggatgccgcttctgagaacaagccaaaagaaaatgtagtatgggggaacctcaaatcagtgctgcttccataggtctccttccttgctggtagtattgaaagtagagactgacataatctcactttcttgtataatctgggatgagtttcattgatgagctcttccactggttgaatctcttgatcaggatgtggaatgcagaaaacagctacagtaatcctctccctctctgagtttgtcaccactcggtgtactgggctcttgaatatcccattgctcattatctctgcttgatctccaacgttgataagaagagcttgaggtataattggaacattaaaccattgatcatctttcaggacttga

SEQ ID NO: 17006 - DNA, 469 bp, Gossypium hirsutum
  Clone ID: LIB3829-026-Q6-N6-G3
gaaagacaagacaaatcctgcttttcatttccaaggcaactatttgctgctaagcatcactgtccaagtgatttcaattcaaggaagacactttctacaaaaatcactaagaaaatgcaacagaaaacatctcatccaccctcatgaattatgacatcaaatccggagactgacttggatcttattccaaacattatgatcacatgctacatcctagttacagagataggcagagaaaaagctacgacaaaaaagtaaacaaaagggggtaaaaatcacttaaaagtcgactgactgttgtccaaactgtcaccgtccaccgacttcttctccttgtttatgtttggtggcttctgttcaacactctgagatccagtaaattttgctagtattacaaatgtcattcctccaagtacattatttaagcatctcagaaccaccactgatgacttaaatgccaggggaggaa

SEQ ID NO: 17007 - DNA, 543 bp, Gossypium hirsutum
  Clone ID: LIB3829-026-Q6-N6-G4
gttctaaattcacaaaattcgtatgaactatattattttagtacggatttacaaagtccttgctaacaatttaataacagcaacagatactgagagtaggcattgaacataaatggatagtacataagtttgtcttcatatatgtgcatgaatgcttccaccaccagtttgatctcaaagtttaggaataacaatacgtaaaaatccatctagaaactcagctgagacactgtccctgtttacattagcaggaagtggccacacaacctggtaaggcccttgtgatatctcccttttgtgatatgcagagattgagccatcagagcaatcagcagctagtttccaacaatggctagaccgtttacccctcaccgttaaattttggtcatcaacctccactctaatgtcaccaatgctgacacctggaacttcaaccatcataatataattgtgtccagattctgcaacatccatcttaggggaccatttagtgccattagatatggaccaacatgtattcttcttagattgcaatggcatctt

SEQ ID NO: 17008 - DNA, 542 bp, Gossypium hirsutum; identical to SEQ ID NO: 11376
  Clone ID: LIB3829-026-Q6-N6-G5

SEQ ID NO: 17009 - DNA, 526 bp, Gossypium hirsutum
  unsure (1)..(526): unsure at all n locations; Clone ID: LIB3829-026-Q6-N6-G6
agggtagaagaatgaaaaccataaattaaccaaatcaaaacaaanaacacaaaagaagggtatagtagctaattagaaccttaatttctccccatatttataaaactaaatgtattttcttgaagggaacaaaaattgaaaagcatctcaactatgggaattaaagtttttgcctactaaccacatcattgagaattatttgggttttcatctccactatttgtaccttgttgttgatgatgctccatgggattattttggtcggaattaatgttcggaccgcctctagaataggcgttaagagcggccaacattcctaaattagattccgataaccctaacccgaggtgttgagacggttgatgttgttgttgcaataacatggaacctaattgcagagggctggctctaccaccttgggactctaggtccccttgaaggttaattcttggtacaaaatgtaagggtgcttgcaatgtgttgccactcgccgttccgaacggccatatctggggttcggatgaac

SEQ ID NO: 17010 - DNA, 556 bp, Gossypium hirsutum
  Clone ID: LIB3829-026-Q6-N6-G7
gaggcgaataaagatgacatagcaattgatttggtgtgccaattgttctgaaaatttgttttaaatgaaaaaaacaaagacagatcaactgtatgaaatgatgaggtcatacagcacaactataatcactgacatcctaaaaccaattagggaattaccggtaacacaatccagtcaccggtaagaaaatagcctcccaaaatttagtaaccatttatctgaggccttggagttgaacccatcagccgagaaaagggcatttgaggacggccaggaagacccctttgccccgcatatcgatcatctgttttctgatctgagaatgatttggaaaaggcttgagcaagctccaaagctgatgctgcttttccatagcgaacaccagcagcttcaggagagactggtttaggctgctccgcaggcttacgccaggtctcaggtgatggctgcctctcctgccgctgctgcctctcaatttccttgtcattccgccagttttcattaggccggttcctcctctgcgtatcaactctttcattgtaaacaccatggtttc

SEQ ID NO: 17011 - DNA, 541 bp, Gossypium hirsutum
  Clone ID: LIB3829-026-Q6-N6-G8
accataaaggcaagtccaatgatctaaaataatcacgtttccattctacataatctcccctcaagtctcacatacagaaactacagatggaaagaaataagaacatagataaaacaacatgatttagaataaactagaacaatactacagatatttcttgcttagacacacaccaaatcaaaatttgaacattgggttttttatatggtaatgggagctcaactaaatgtgcaggaacgaaatccctcccagttgtaactggacctcctaagctttgtcattcccagagagccatttacctagccagcctgaaccagaatcaaattagatcagcaacatttgatggcagctcctcaattacaacattataaaacctctggatgtcatatagcatcctctcatcatctgtggttacaaagttgatggcaacaccttttctcccaaatcttccactacgaccaattcgatgaaggtagttctctggttgtgttgggagatcataattgatcacaagtgagacttgctgaacgtcaataccacg

SEQ ID NO: 17012 - DNA, 514 bp, Gossypium hirsutum
  Clone ID: LIB3829-026-Q6-N6-G9
cagggcacgagtttcttattaatctcttctgccatgtatgacaacatacatagcagaatggagtcgacagtacaggtagactagatcgtttttaaccttatactaacacagcagaagatgggaaaataatacagattcgtgattgtgagatgaatttgagaagctttgtttcaatcaggataagtgagtaaagaaatgagatgctcatgtttggggaagcgagttacaagctcggatcgttttgccagctcgaagtcttggaactggaaagcaggtgcacaggtgcatcctacaagtgaataatggctctcagcatcccttggatcattttttgtcactgccccatcagtcgaaatgttgaaatcttttgttggaaatgcaccaaaccaaacatttggaggcactgtgtactgcaccttctgattattcaacaaatcaggtccaagacatgttagttttacttgcccatctttctcatccaactccaagaccgtaagaggttctcccaaataaa

SEQ ID NO: 17013 - DNA, 312 bp, Gossypium hirsutum
  Clone ID: LIB3829-026-Q6-N6-H1
aatcttaagcagtttgcccatttatattgtgaaattacatcagtttttggggtgacggagtctccgtttgatgggaacagatttagggtgatggaatctacggtttatcatatctaccatcagatcaaacaactaattaggttcactgcactgcccgcattggatccctttgaagagtaacatccaacttctctggccatgtccggctacatacctctagactctatccaaacaaatgatggtatcagaattccatttcaccggctaaagccaccttccaattcttttccatctacttatggtggaaagaaa

SEQ ID NO: 17014 - DNA, 538 bp, Gossypium hirsutum
  Clone ID: LIB3829-026-Q6-N6-H2
cacaattgagtcaaagatagatcatggatatatgaaatagtacagttgattgtataaaggatactcatcttatacacatctattatcattgaagagaaactcttatagctttctttgtttttatagttttccttctgtttcttccatacacacttactggaaaagagatttttataagacctttacaacctatacttatttgcattttctatacaagcaacatccacaatggctgttgaaggagcagcaaactcagcaagcacgtgtttcacttagcgtcccattcacaggtccagaaacaccggaaactttcaacgatgcaaaaaggcatgatagtttggatagtctagctatcatgggcctggctctcaccattctgggcataaccacaagctccttgccggtaatattatcaaaagtattatgatagccttcaagatcttcttttgtaatcataactgcatctgctgttggggagtgtgttggctgtcggtgcctgctatactccataactgctttccattgtgagggagcaagc

SEQ ID NO: 17015 - DNA, 381 bp, Gossypium hirsutum
  unsure (1)..(381): unsure at all n locations; Clone ID: LIB3829-026-Q6-N6-H3
gtggtggttttggtggtggtgctggaggagggcttggtggtggtttaggaggtggggctggtgggggtgcaggaggagggctcggtggcggcggtgggggtggattaggtggtggtgctggaggagggcttggcgggggtgccggtttaggaggtggagctggtggtggtgctggaggagggcttggtggtggtttaggaggaggagccggtgggggtgctggaggagggcttggcgggggtgccggtttaggaggtggagctggtggtggtgctggagcaggtggcggtcttggaggagggcttggtggtgggggtggtgcaggtggtggagttggaggaggaattggaggtggtgccggnggaggtgtnngtggnggtg

SEQ ID NO: 17016 - DNA, 462 bp, Gossypium hirsutum
  Clone ID: LIB3829-026-Q6-N6-H4
aagaaaaacacaaatttaaattaggtttctcaattataaaaatgcaaaattacaagcattattaaattacatccttcagcccctgcccataacaagcatagtctcatagcactcgagcaatgagcagtggcactgcctcagttgcgacagatcctagcagttggcatagtaacacaaacaggagcatacgccttcttggcctctgcgctaccacgtttaggctccgccgttgcaacccccgcaaccgagcaaatagcagcagctgcagctgcaaacatcatctccctccttccattgttgccctctgttttcctctcactgctcatctggacactctccacttgagctcccttagcagcattggcaaccactagtctccgctgggtaatttttggagaaccctttgtgaggttagtggtgctaaggaatgatgttgtcatggtgatggatgccgcgagcggc

SEQ ID NO: 17017 - DNA, 538 bp, Gossypium hirsutum
  Clone ID: LIB3829-026-Q6-N6-H8
gaaatcaaattaatggtaaaataactgaagttcaaaataagcaactacaagattctaagtttatcctctaaaagttattacaagtgctgtttaacaataatcactcggatttctgcttcaaatattttggtacagcagggtatcgcaacctggttgtgcgtttgccgatgaatttgagaaccttatcaattagaattaccgggaaagcaacggcaattacgagcagccattcattggtgctgaggggaacaatcccaaacactcgagcaaggaatggcacatacagaatcaagaagtgcagtccaaatgatactgacatggctaaaaggagccatgggttcacccaaggaggcattgttaacaagctttcatcttcaaatagggcattaagggagttgaacatttcaatggctaccaagacagatagggaaagagtcgaggctttgattttccctgactgaaagtagtcgcatgggtcggaatcgaatttgaacacttgggaacctgctgtgaatggtgacacagaaaaaacttccca

SEQ ID NO: 17018 - DNA, 551 bp, Gossypium hirsutum
  Clone ID: LIB3829-027-Q6-N6-A1
aatactaacggtaacatctgcatttcatgatttcaacacaacacgacatagaactctgacatcaaacgtttaacgcactcagaaaccaccacggcaaacgctagaaactacttacagggctaacccccaacttatttaaagcccccattgacaattaaccgtaaatctaaagctgcttcaagctattttaacctcgatggtcttgggtttcttaggctcagggggtggcagtttctccacagtaacagttaagaccccgtcttgacagattgcagagatggcatcagcgtacgcattctcaggcaacgcaaatttcctcataaacttgccgacccgcctctccattctcacgtacttggctccttctttctcttcctctcgtttcctttctccgctgatcaagagcatattgtcgtcctccacttggaccttgatgtcccctgatttcagccccggcatgtcgacgatgaacacgtaagacttggggtactccttaatgtccgctggtgttgcagccatggctttggcatcccgcatgtaaacctttgatg

SEQ ID NO: 17019 - DNA, 477 bp, Gossypium hirsutum
  Clone ID: LIB3829-027-Q6-N6-A10
ggcccaaaaacgcatttttttcacctctcctactaaaagggtcactacatacataaatccatacatacatacctgcgtgcatgaatggcgaagcacatgaatggtaaaacctttttaagcccaatagtttgctagaatccaaagggggacggcaagagggaaaaaaatgttgttggtggggctcgggaaaaggggcacagcatgacttggatcattggtgccggggggtgttcccgacggaccaagggggggggggccaccaccaaacaccgggggagacccggggggtgtccccggggggggtgttggggaaggaatcccggggcttggccctgttggcgggggccccgttgttggggggggaggaaaccctgggggcggggtcccccttgtgggggggggaggaggccctggggttgggggtgaagaaggcgtccctgggggcggggatcacggaacccctgggggggggggggg

SEQ ID NO: 17020 - DNA, 507 bp, Gossypium hirsutum
  Clone ID: LIB3829-027-Q6-N6-A11
gatatcaaaattaccttttcatatatttaaaacaataaaacgagctttaaaatctaatcaagtttgggcaaacaaagccaacctgggaatggacacctctaatcccacccaccaatgtacagttaagacaaaacaaaaccaaaaactcataacactacagtttaaaacagtccaagtatttctttgcagattttctacttcaccttatctcagaaggtcactttctccaaatataacaaccgacgccccgaataatctgtgcagaatcaatggaaaaacaagttaagacgttgttttttcctgcagtgtgtgatggacatgccaaaataaatagaagcaacgagattaactggcggttccaagtagctctgatttgtgcaattatttatactttcaacatcatctttacagattaggagttgtacataactatctgttcagattcgatgatgtagccatcggtatggtcagggcagcttgggagtcatcagagatattgcgaattgc

SEQ ID NO: 17021 - DNA, 439 bp, Gossypium hirsutum
  Clone ID: LIB3829-027-Q6-N6-A12
aaaggcaaaaacctttttttaaatttttaaagaaaaagggggggggcccattaaaaaaaattttccgaaaccgggggggggcccttaaaaggaaaaaggaaaattaaaaagaaaggttaaaccttttatttaaaacacccaaccttttcccccaaaaaaaaaaaaaaagggggggcccccttttttttttttttgggaaaacccaaaaaattttggggggtttttttttttttgggaaaaaatttttcttttcccccccaaactttaaaattttttttcccggatttttgggaaaaagggaaggggcacaattggggggggtaagggcctttccctttttttcccaaaaaaaatttttgtcccagaaaaattggaccagggggggaaaaccttcccgggggtaaccttttggggaattttaaaaatttaactttggaaa

SEQ ID NO: 17022 - DNA, 516 bp, Gossypium hirsutum
  Clone ID: LIB3829-027-Q6-N6-A3
gaagaaaccttggcattcgcttattactactattaatttagtaataatttaacagatacatggccgcaaagcaaatctcaaaccaaacaatgaagtcggcaggtggctacattgacaatacaatctttaaaattattacaacccaagagcgaaaggaaagcctgtagagcttaaccaacttcctccagcaatgaacctgccaggagtaaaagcctgagcttcacttgcactagtgatcaccttgtaccctccccatttcactctcgcagaagttgaggcaccagccccggtgttctggtactcggcataaaacagtgttttcagggcgaaactcccgctccactcgtgccaaccagcaggttgaatcacgtcactgattgttgattgcattaccacagtcctcgagtactccttccagggcctgccaagatatgttgggaagtttttacgaacaggctgtaaatcagaagtggcacctatcctacatttctggatcacaatgcccgtgttttggtt

SEQ ID NO: 17023 - DNA, 544 bp, Gossypium hirsutum
  Clone ID: LIB3829-027-Q6-N6-A4
aaaaagattatgagtaactaaaggtttacggaaacaaactctttcatacataatgtactcactatcaatactcacaaactcatcatcaagactttgttaaaaggcagttaaagtattatcacagatgcaatgtgtaagtattattctgaagcaactcgataatgactcccctattacatcattcacacaacaaatagagaatcagctgagggaatctacggcctccgaggaggcgaactactgctgctgcttcttcttcctctcaatggcctcctaggactgcgactccttgaaacccttcgtcctgcctttcggggactgggtgatcgggaataggatgatgacctcccacgtcgtgccgcaggtcctctgcctcttggtggtgagattgaccttgaacgagaacgaagaggtctgcgaattggagaacggctccgcctacgaattggagaagggctacgtctacgattgaagggagaccttcttggagggctacgaggtcgtctgggaggtgaacggcgccttgggggtggagaacgccttc

SEQ ID NO: 17024 - DNA, 538 bp, Gossypium hirsutum
  Clone ID: LIB3829-027-Q6-N6-A5
gagccaatatttgtatatatatgtgtgtgtgtctaaaagttaaacttttgcagcagcccaaagttgaaagagaagttatagtttccggccaaaaacaaggccaaaacaatcagggatgtaacaaggacccacatccattgctgcatctttctcttaccacggttacgaagtggcggcggaatggattttgccttgctttgttttgtgaactgtggtggcttttgagatctctttgccactgtcacaagtttctctgtactttcagaatcttttggagtttcagctggagtttccaaagtcagagcagattcggtttcgtctgtaacacttgcatcccctactcctgctgcagccacctttcttctttccttcttctttgccctcttttctctttccttctctttctgctcagcttctttctgagctcttagtgcagccctggcttgtgccttctctgcatttcgcctcttcctctctagtgcctccttagctttagctatctcctccaaccgacgttgctctcttaatttagctgctt

SEQ ID NO: 17025 - DNA, 530 bp, Gossypium hirsutum
  Clone ID: LIB3829-027-Q6-N6-A6
gcattattgacttccatcactggctgaagatcatggtattgggtactaatttttaacttcttacataattcccatcttacaaaaatcttggagcttcattttagttccattgttcaggagaataccaatgaagacttggagcttgttcatctgaaaagaattacaagcttcatctgcagtgaagaaattatgttcttccatcttcacgtactggtggggttgatagcttgtttttgtgaaattgaagcaatccatggaggatgttggtgacgaagaagatgatatcaaaaggtggtgttggctgtctagctctaacaccccagatgatgaaaaagccgcgttgttagggctattgcccttgttggtgttggtgttgaggatgatgtcttcatttaagatagcactggaatcactgtccgatgatccatctttcatgtctggaaaaagggttgcaccaagaacaactgatccgtagttgagatctgcagctggttcactttgttcaagtgttttgttatcagtattttcag

SEQ ID NO: 17026 - DNA, 560 bp, Gossypium hirsutum
  Clone ID: LIB3829-027-Q6-N6-A7
ggaagggaaaatattaatcttattgcaaatcttgattgattcatggatttacattgtcacacctcacaaatattttcaactgaataatgtttcatactgtctttcaagagttcactaaaatggatagaagagaacaagttaaaattgccttggcttagcaacaatggtggaatgcttcaaaatatgaagactgaactgtccacctttctccgtggtatcaatttgagattgcccagggggaggcaagagctcaaaattctgtaccaaacgacccaaagtaataccaaggatgggcaatgcaagaataattcctgggcaacttcttctccccacgccaaaggggaggtagcggaaatcattgccgttggcctcaaccttggcttcctcttcaaagaacctttcaggcctaaattcttcgggatttttccagttagcagggttgttggcaagccaccatgcatttaccaagattttgctctcagcagggatatcatagccacccaatttcgcatcatgcaggttcatgtggggcacgagtagaggaattgccattcgtaacc

SEQ ID NO: 17027 - DNA, 544 bp, Gossypium hirsutum
  Clone ID: LIB3829-027-Q6-N6-A8
ggaaacactggcataaaacactttcacataaaaacccaaactcgaaaacataaacaactgtcatccaaactccaaaacagtaccatatctgaaatttcaaacaaaatttctagcttaaatgtgtgctttaacagtcattgatgtaaatataaacgccaaaacaactagtatcctattatgccttatcggccttggcagcagtggcagcagcttgtcctctgagcctaccagtcctccttgcagcaataagaccaaccttttgtccaggtggagcatcacgtctaactgtactagcatgaccaatgtgttgatggttaccacctccgtggggatgctcaactgggttcatagccacaccacgaaccttaggccagcagttcctcttcactctatacttgtggaaagcattaccagccttaagcagaggtttctcagtcctaccacctccagcaacctgcccaatcatggcacgacaaccacttggaacaatcttcttcgaaccagatggaagcttgatcctggtggtgtcgttatcagggttgtg

SEQ ID NO: 17028 - DNA, 532 bp, Gossypium hirsutum
  Clone ID: LIB3829-027-Q6-N6-A9
gcattacaaaacatgtaaattgagctgtaaattgcattttacaagagtataatatagatatgattacatgcatcacaaaacatgtaaatcatagtgaagcaggaagctagggtcaatataacagaatacactcgtaatcagagagagagatcaggtcacacacccgacccagagatggacaacaaaagaaagaaccattaacacaagttataacaaaagaaaactgcagttcactacatcgggaagcagctcataccttacttgtttctcaatggcattcaaaatctcctttacctcttaagctccttcctctcctatagtcaatctctgcatcagagctagacaagcctagttgatatttcctgctccttgatgaactcttcttcaagtatatatcctcttcatcagtcaaggtatggttgataggtgtacttgatcctgagacatcacccacctgcctccttgatttctgatcttcgtatccattgcatgcaacttgcacatcatggtgtacagcccaattgacaatata

SEQ ID NO: 17029 - DNA, 555 bp, Gossypium hirsutum
  Clone ID: LIB3829-027-Q6-N6-B1
agaaatgaactcaaaacttcattaaaatctgtaatccagtacaagaatcacaaatcgtaaacgaaagcatacagtacccaatgtctaatttctaatagtcactaattacaaagccctaacgctgatactacgctcaaacattcttgaccgcaagacttcaaatccccccaccaccatcgccgccgccgccatcgcagccaacttcagcaatcctgaacagtaaacaccaatctaaccaccgaaaccgtacaaagtcctaccctgcctcttgagggcataaacgacatccatggcggtcaccgtctttctcctggcgtgctcagtgtaggtcacggcgtcgcggatcacgttctccaagaagatcttcaacactccacgggtttcctcgtagatcaagccactgatacgcttaacacctcccctacgagctagacgccggatcgccggtttcgtgattccctggatgttatcacggaggaccttgcggtggcgctttgctccgcccttgcccaaccccttgcctccctttcctcttcctgacatattattcaagta

SEQ ID NO: 17030 - DNA, 515 bp, Gossypium hirsutum
  Clone ID: LIB3829-027-Q6-N6-B11
attgccagtaaaacatatatgtatatatataaagaagcaaattcatttactcaattactaccactcaagactaccttagatgagttgcacatccagtttgtctttgccagtttagcaactacgaggagaagatagtcgtagccaaaatgccggagtcggcaccatgattcaacttttaagatctcagcgaggccgtaccccaaaattattggaactgaaaaagcagccattctctgtatatccgcagatcataacaaaatatccggtaacattgaatctcaagagagttaacctagaaaggcattattgagtatcaacgcctaagcggttttggggactttattggggagaacattatcgggaagataagctcgggaggtgtctcgcgaacaacaccgagcattgaatcgtattcctcatcccgacgagcaaatttcttccgcagcatcttctcaaattcaatttcatcgaagctctttccattttctgcagcatgaacttgagctaaattggaa

SEQ ID NO: 17031 - DNA, 535 bp, Gossypium hirsutum
  Clone ID: LIB3829-027-Q6-N6-B2
gatcttgaacggtacttcctctttgatcgacgttcattatgatgaataccagaattcatcttttcatttttgtcacaagtatcgatatccattgcacctgagctgccttccctttcttttacagaaaggcttccaccctcagcacccgaaccacaaacccctaactcaggtggttcggcagataagccacgcaatgattcggttttaagtggtgcagaaccactttttatcaaggctgcaaacatctttgcccgttttaatcgttcagctttcagtttttcttcttttgtcaaacatgcctcggacgaatcagcctcacttgcagctgcaatagctgctgtctttgcaatagcattagcaacctgaccagaaacactcggctcgcctttctgaccagaacttgggacatgcccatcctcactagttgggacctgactgctaccatttaatgatgtcttcgaaagaatctctaaatttggtttcttaatgcctcttgtggcagcctgaagaatagcagctgcggcagctgcatcca

SEQ ID NO: 17032 - DNA, 520 bp, Gossypium hirsutum
  Clone ID: LIB3829-027-Q6-N6-B3
ggcagtaagaaactgtataaatatcccagaaaaaaacagcacttatcatttaaaagtactcgaaaataactaacaaaagcaccaaacaaaatgtaaaacaagctaacagatgcttcaaaagtacgataaatctactgattagagttcatataaaaacatgttaggcttaatcaacttcctccatcttgctgccttcggcatcagcatcctccaatgggggcatatcagcatcagcttcagcttcacctgcatcctcgtcaatgctcaagccgagtttcagcatcctgtggatcctgttgccaaaggtgttagggtcatcaaggctgaagccagaggtcaggagagcagtctcgaagagaaggagaacaaggtccttcacagatttatcattcttgtctgcatcggctctctttctcagctcttccatgatggggttctccgggttgatctccatcgtcttcttgcttgacatgtaaccagccatgctgttatccctcaaagcctgggccttcatgattct

SEQ ID NO: 17033 - DNA, 544 bp, Gossypium hirsutum
  Clone ID: LIB3829-027-Q6-N6-B5
gaatgatacatactattgttaattgataacataccttgtcttgtcttcaaaggtcatcaagatttatgctagagctaaagtaagtttccaaatgaacagcctcagccacacaacaatttctacaatataaattacagagaatgggtcttactaatggtcgttgtcgtccagctcttcacgatgttggtgttcaagtcgaatatggggacagggtctttctggttctcctcttgtccagagaactcttagatcacgtctcttttttcctagggttaaaaaggttcctagtgtaaaagggacaatgtaaaggagtgctggttgaccatgtccatccattaaatttagagccacatatgtaatgagaagacctaagccataagcaatcattgcccacaaaaagtagccagctcgaagagtcttgttagccagccaatcatacctgagtgaaaatgttatcaacaggccaggtaaaaggatgtcaccaaatcctattatgctataaccgccccatggatcaaacatgcgtgggatcttcagtagcatt

SEQ ID NO: 17034 - DNA, 561 bp, Gossypium hirsutum
  Clone ID: LIB3829-027-Q6-N6-B7
atataaaccaaaattattaacttccaaagggatattacaaagaagggtctggattttttcttccttctacaattttctcccaaatttcaaaggcaagaaatccaaattaccctcataaaattatataaaatatttaaaaaaaaaccatttattacaaccaaaaaaaaccattccttcccctaattcttgttcctatagagttaatcaccccccaaaagctgcaaatcttcaaatctccttgaatggtagagaaaaaaaaaacccataatttgttaacttaaaaatactattttattttatttatttctaaactacacgcattcttgaattcttctttatatatatataaaccaaaataccatataccctatcataaaagctactaaccctacatctttttccatcaaaacaaacactattttgagagaaaacttggactaaattttcagtaagtccattcttgaggcaagtttaagcttccatctggtctataatttcttcttgcttgtgtcaagagtgcatttcttcttgctaccaaggcatcatagtttgatgcaaaag

SEQ ID NO: 17035 - DNA, 538 bp, Gossypium hirsutum
  Clone ID: LIB3829-027-Q6-N6-B8
gtatgaaaattaattcaataataataataacaaattagaacactcctaaaggaaatttatttaccatattttgaagcactactacataattacaattcgcctaaaaaatatgtcaactactactatttttgtggtaataataaaattacagttcgtaacaaaaaccagatgcatagaaaatcaaatccaatccctgctaaacatttaacttggaagtaaatggtttctctaagccaaatcggaccaatgaggtagcatcgtcttctccgtagctccggtccatcggctgtaagctttacttaaatgctttatcagctgttattccacttcgatctggtatgagtttcttcatgtaatacttggatttacgggataggtttatctttttcctcctttcttccggtatcatgttgatcgtacattcagtaaagccgcgcctaacaaaccagtcagcagtgcgagttgtcaacaagaaaagcatatccaatccgagagaggatgccttcttctcgacgtaatcgagcaatttatctccttg

SEQ ID NO: 17036 - DNA, 554 bp, Gossypium hirsutum
  unsure (1)..(554): unsure at all n locations; Clone ID: LIB3829-027-Q6-N6-C1
gaagaacaaaaagaatttataagtgcattccatcatcatagctggaacttgaacgaagatttagacagaacaaaatcctgcttttattcaattgtaacagngaaaagataatttagcaatattgtttaaaacttcactgaaatggtattgggatgccttgcttcttgttaacaatggccattgccatgtaacggattcccatcccgataggtacttgttcctctggtccctcccaaaaggggcttcaccgtcaccgactaaacgccagtatccagtccttagagcttcagcttgttcatcagtgcagttttgtagcagagcttcaactcggaagtttattccaagtgaaccaaggaactgagactgagtaatagggccatgaacagatacatcatctgaagcttcctcagcagagtgcttgattgatgcaaaatcgacatatgcactaagatcagcactcccagggttgtcaagtatgttaacaaacttgtgcttccgaattgcctgcagactatctgacactactccgttcaggccataatcgataataagtg

SEQ ID NO: 17037 - DNA, 557 bp, Gossypium hirsutum
  Clone ID: LIB3829-027-Q6-N6-C10
agagagtaaaacgaacccaaaacagttaattcacacatcggaagtaagctgtacatagccatacagtttttagctaaaatgtttttggtttttgatttcaaacaatagggacctaatggtacataatagacaattagctttttaagagaatcacaggcaaaacaaaaatttcaaggaaaacaaagatatcagaaactaaaaatgcattaggttccgggcaaaaaccgggtatcattatcagcacctccaagctgaagccgcgattagttcacgtctctgccaacaaagaacgagagatgactgcctcttctcgacgtggaaacctctaattggagttcgttgaatcaaacactcggcttgagactcggtgaagttactgaaagttaatggagagaatccggattgtataaacaaactcctccatggaggtcttctttcaagagaccgatgtcgacccaacacaattttttcaatgcttggttgaaggaagaacctttcaatcttttccaggcatcaaggttcatgttcaccgcatcaagggactcaaggaggcccgg

SEQ ID NO: 17038 - DNA, 480 bp, Gossypium hirsutum
  Clone ID: LIB3829-027-Q6-N6-C11
cttaaaaatcgagaatgattagattttgcaaatactaaaaaggttacttaaatgtataaatttaaacaatttaaaaaagagcagtgtaattcaaaaagattgacttaagtttttctaactcttatacaaagagtcgccataacatgtgtcaacaagtctattccaacgcttaataaaatgtccacccaaaagtatcggcataatgtttaagcgtagccttatgcatacctatctcaacactgaaattaaattattcattatatctatttcaaggggaactcatctccgatgtcagctcaacctccaatgtctgcaatttctggaagtctttgattcttcttttcagctttttcgttagcttcttccttctcatcttcaaacgctctaagcttgccacactctctgcagcatctattttggtagccatcaaagattcaaccgtcactctttccttctcatcttcaaacgctctaagcttgc

SEQ ID NO: 17039 - DNA, 393 bp, Gossypium hirsutum
  Clone ID: LIB3829-027-Q6-N6-C12
aaaaaaaaaaaaaaaaaaaaaaaaaaaaatttaaaaaattaaaaaaaaggaaaaaaaaaagggggggaaaaaaaaaaaaaaaaaaaaagggggtaaaaaaaaaaacattgttaaaaaaaaaaaaaaaaaaaaaaaaaaaaaaaggaaattaaaaaattaaaaaaaaaaaaaaaaaaaaggggagggggaaaaaaaattttttaaaaggggggggttttaaaaaaaaaaaaaggaaaggggggggttgaataaaaaaaaggggggggggaaaaaaaaaaaaaggaaaatttttttttttgggggggggggggcaaacgggaaaaatcggacagggcccaaggggggaaaaaagttttgttaagggggggaggcaaaaaaaggggggaagaaaaa

SEQ ID NO: 17040 - DNA, 216 bp, Gossypium hirsutum
  Clone ID: LIB3829-027-Q6-N6-C2
attaaatatttaatagtattaatttttttttcgtggaagaagccatcgaagatgtttgttttagagtttataatgtgaataattctatagtaaaaaagaagcaatactgccgggccaagaggggagcccgaaggccgacgcccgggacacgcaggggccaaaaaacgccaagggggcgcgggctggaaggccacgagcgaggcgcgaaagcggggg

SEQ ID NO: 17041 - DNA, 450 bp, Gossypium hirsutum
  Clone ID: LIB3829-027-Q6-N6-C3
gggcaaaaggcaaaaataattcccaaaaccacaggggaaatcccccctaggggggctttcaaacccaagaaaagaaggtaatttttttaagccccccccaaaattcaacccaggttggggggcaaaaaaacctggaaacaagagggttaacaccctaaaccattccagggaagggcccaacccccaaaaaaacccaaccggaaaggaaaccttcagggaccccccccggggggatccaactatgtaaaacccgaaaaaatgaccatgaagaccccgggggacccgggtcactgggaccaccgaaaatggatggctctaacaaaaaaccccggcagggggggggacaaaagccccggctgcaaaaacaaccaaaaaaaaagggttgaggaaaaaaaagacggcaaaaaaggcgggggggccccggaatgcccggagggtgcaaaacagaac

SEQ ID NO: 17042 - DNA, 556 bp, Gossypium hirsutum
  Clone ID: LIB3829-027-Q6-N6-C4
gaaacattgaaataagatgttaagcaattagaaagtaatatatgttaagcccaatcagccccacctccctccgaacagatacaaaacagttaaatagtaatccttgacaagtaggaaaaaccattttctacctacgttagatttaatatttcatttcacctataggaaatggaagtctgaaggaatcagggtaagagatgtgcagcatataagaaacggccccataacatatttccctctttctacttactaatggtgcttacttgtgaatgaaactattgctggatactacttactcactttcatcatcactttcctgcaaactcaaatggttcatgttcctttctagaggaggtagcccatcttcagaatcattggaagaaccctcctcatcttctgaatcattggatgcaccttctgctgcatctggtggaaccttagggacctgcctttgttgggaaagccaagaattttggactgatatgatgtcagcactattttcacattcagaatatgccttcaaaagttccctgttaagggacaggaaggcatgacc

SEQ ID NO: 17043 - DNA, 520 bp, Gossypium hirsutum
  Clone ID: LIB3829-027-Q6-N6-C5
gacaacaaattaatatctattgatgggtaccccaaaagataacttgggtttcactaaattgtagtaaacactaaaacactagtatgtagtattcaacacttcaaaatatattatttcataacactgactttttactcctccataagaacatgacaaagggtctgtgcatgtgaagataccaaactcgaaaaataacagctaatttggagatagaaaatgcactcgagcaagtgtgtactcttttccagctatccaaacccctgtttgcgaccactgcacatcttcccagtcaacattctccaccaatacctctacgtgctcgagtggcaagggaattccaattgaacgcatgactttctgggaaaggggcttcttacaccgagaccatctgaaaacatctatcagggtgttctcagagtcgttcttttcaccatttgaggaatgtgagtggtgattttgagacttctctgtatctgcttcatgtgcttgagacgctactgtagctttcaccattttctct

SEQ ID NO: 17044 - DNA, 531 bp, Gossypium hirsutum
  Clone ID: LIB3829-027-Q6-N6-C6
gatcataaaaaaaattcacttgatatgatttctacttttatacatcactctctctctcgttaccaaaaccttggatacatatcataatcattatgtataacataaacaaatacaccatgttatgtttttctgtaactgggatgacactttgatcgacgagtactttttcaaacattccaaatcatcaattgaaatggtgttgttcgagccacggccaaaaccccgtttgatcctcgatgttgcagaacatgttacccaggccttcttctttaacaatttgatccatcttttggcattgaaggtgattatcaggccttgatgatgaggtttgaaacagctgtgcgactgctgtagttggcctaatggatgttgggaaaagggttctgcagcttgtcggatggctgtcaatgactgttggtgtccttgacatacccagcttcacatccgagctgttttcacttctgttactacatgaaccttccgtttccttgttgaggttgatggattccgttggttctttgcctttcagtg

SEQ ID NO: 17045 - DNA, 525 bp, Gossypium hirsutum
  Clone ID: LIB3829-027-Q6-N6-C7
aaaaaataaacactcagtcctcttattcaaatacaatttccctaccacaaggtaaataaaggggaataaagaagtgatcacacccatatgaaatcgacttgacatctctacatgaatgaagtaaagaaaaggatagtttggtgtcgatatttttaacgtcaagcacatgttgctgtgatggcgaaggcttcgactactggctttgggggggggatttcgttactttgcttcgtgttttcgtcgctttgcttcatgttttcatccttcatctttgctaaaaagtcgttgaagcagtcatccaatgttcggaatggctcattcgggtacaaactgcaggcttcggtttcattcgggccttcgattgggaagttgatttgacaaccctttatgaagatgtcatgggtgaatgatgcaacaacactctgtgggataatattctctgccgcagccgaaagaagtcttcctcagtgacggtaactcgagggagtgttcgccggattttcctttcccacaaagctgcaagct

SEQ ID NO: 17046 - DNA, 533 bp, Gossypium hirsutum
  unsure (1)..(533): unsure at all n locations; Clone ID: LIB3829-027-Q6-N6-C8
ggattaaataataaaagtaaaatacatagnaactataatacaaattacaaataatacatgtccgaccaactaaaattaatatcaatacaaaaccacgcataaacttcgcacatcaaaatcccaataccaatgaagccaccaacaacatgcttatgcacagcagattggcaatgaggttaactctggacagtccttaatttgcaagtctcggagtgcagtcagatatcacaccccctcagataaagaggctaatgtctgacaatctccaatcttcagtgaacacaaggaagataagccttgcaatccatttaccggaaggcatacaaggctgtgacactgatctaaacgcaaagtttctaaagagctgaggttttttagccctgcaggcaagctttctattgagcaagcatcaatatccaagtatttaagggaggatagatttatccagcagatcggataaagactttagactacaacaaagaacatacaaccaatcaagttgcttttgattttttagcagtctattcggtaat

SEQ ID NO: 17047 - DNA, 536 bp, Gossypium hirsutum
  Clone ID: LIB3829-027-Q6-N6-C9
acctgtaaacgaactcaatcattttattttgaatgttctatcatgggaagcaagcaatgctttagataatgaaaacgatgaaaaaccaagcataaattattaagtcatagcggataaggcaaactagacattcatacagaggaacttaataccgaagacggttcatgcatctccagctccgatcaaggcaagaagaaacttctcatagtcacccgaagtatctttagcaattgcttgttcgagagggatgctgtttcttcgttgatatgcctccttaatacgtaccatgtcgacctctgcacgagttgtgacgactcgggtaagagcccattcatcggatcccaacttattgatggcttgacgtagaaccttctcgaaatattgctctggggtggtcaagcacttgatcacagctcttagtaatttgaggaattcatcactgggatcagccttcaaatccttgttgatagcattgccgaatgaggtattgtaatggttgagagttgcattgagctgtgccttactccttgttgata

SEQ ID NO: 17048 - DNA, 550 bp, Gossypium hirsutum
  Clone ID: LIB3829-027-Q6-N6-D1
ggaagggaaaatattaatcttattgcaaatcttgattgattcatggatttacattgtcacacctcacaaatattttcaactgaataatgtttcatactgtcttacaagagttcactaaaatggatagaagagaacaagttaaaattgccttggcttagcaacaatggtggaatgcttcaaaatatgaagactgaactgtccacctttctccgtggtatcaatttgagattgcccagggggaggcaagagctcaaaattctgtaccaatcgacccaaagtaataccaaggatgggcaatgcaagaataattcctgggcaacttcttctccccacgccaaaggggaggtagcggaaatcattaccattggcctcaaccttggcttcctcttcaaagaacctttcaggcctaaattcttcgggatttttccagttagcagggttgttggcaagccaccatgcatttaccaagattttgctctcagcagggatatcatagccacccaatttcgcatcatgcaggttcatgtggggcacgagtagtggaattgcc

SEQ ID NO: 17049 - DNA, 464 bp, Gossypium hirsutum
  Clone ID: LIB3829-027-Q6-N6-D10
aaaaaaaaaagagggggcccgccccttaagaccccccctcggaaaataccagggggccccccctttgaaaaagagagaaaaaaaaagccccccctaaaagaaaactaaaaccaatcctaaagagaggggggaaaaaaatggaaaaagaaaacccgggattcccccctggggcggggtttaaaaaaccccccatttttttaaatcccccggccatttgggaaccaaggaaaaaaaaagcccccccttttttttttaaacggggtttttcctttttcccaacccagccccgggggaaaccccccaccgggccaaagccccgggggggcccaacccgggggggggaaaaggggccttgttcccccccccagcataaaaccccctttttttccctccactttaaacccacccccggggggaagaggggcccaccacaaactggctgggttaaaaggggggggacccaa

SEQ ID NO: 17050 - DNA, 548 bp, Gossypium hirsutum
  Clone ID: LIB3829-027-Q6-N6-D11
gcaaaggaacttattattgccataaatttaatataagttgatacatgaattgaataggcgttaagcttcccgcccacaccatcaaagacctctagtctttaacaataaacacacaaattcatgggatttaaataatctaaaaaggaaaaaagaagaagataaaactgcaagccaagtggagcacgaccaattacttaaaaagcatgtttgtttaactttaagcagcaacactatggagcacaacagtctcaacagtgaggccaggtccaaacccaaagagcactccccactccaacccttctcctgtggtctgaagcccatcttcccttgatttcttcctcatctcatccaaaataaatagaacacaagcacttgacatgttaccatactctgaaagaacgtgccttgtggctcgtagcttctctggcttcagtgctaacttggcttctacctgatctaatattgctggaccaccaggatgagcaatccaaaaaagggagttccaatcggatatccccaatggttgaaatgcttctaccaggctcttt

SEQ ID NO: 17051 - DNA, 541 bp, Gossypium hirsutum
  unsure (1)..(541): unsure at all n locations; Clone ID: LIB3829-027-Q6-N6-D2
aaanagacagattttgaagattaccaaaccagaaagaagggtagttttactgggtacatgccatagaggacaagtttagatattacattgaaaatggggcaccgggaactggtcaataaacagaacgagtaaatatagtatttcgaaccatccctcaatatgtaacagttccaaacaaacgtttaaactaacataataataatattgagaagtttttccattctgggttgtggtcttgatgcttaagcaggtgatttggtatagaagcggactccgaaggccaatcccaagatcagcaggggaacgaggaattggagaagctttataacaaagtccgaggtcttgtcctgctcatagtgaggctgcttgggaggggtgtacttggtcttagttgggatagttgatgtatcgacgtcacccacgtaaaactcatccatcattgcccgagcactgctactatgaccaacatcctcaaaatcatcacttgcatctttccctgttgcagacaacaggacctcatcaccaccaggatgatcctcca

SEQ ID NO: 17052 - DNA, 546 bp, Gossypium hirsutum
  Clone ID: LIB3829-027-Q6-N6-D4
actaatatgaatattagattttattcataaaaataaattatataaattagtatgcaacttttcatactaaatgatacttttatcctcaaaacataatacatttatttcgtcatttcatactaagatgaaattggcacatactttctaaactttcggcttaaaaagagttcatatgaagcctcttggagattggacttaaatttggagagcatcagcaattgatcctgcaagactcagaacttcaaaaggagctgtgttttcaatggctttcacagtctgggggcatgaatctgtgatccaaaagtaggcaaatcccttctccgacctgttgttcttctgagtaaaccgctcccaggaacgcttcgggaaaacaccatgagtgacatatgcgctcacctttgccgcaccatgagcaaacagaactttctggcattcaatgagagtgcctccagattgcactaagtcatcaactataaccacatgacaaccggtgggatttccctccttgagtcgaactatcctcttgtcaccctcacgaacctttgt

SEQ ID NO: 17053 - DNA, 534 bp, Gossypium hirsutum
  Clone ID: LIB3829-027-Q6-N6-D5
aagaagataatggtaaacaccatgtaaaaatttcctccttttaaacaaaactgtttctaaaaggccaaaagaaacatttcaggacccttcaaaacaaaccaaaaatactgaattaacaaataaaaccaacgtctaattcattctccgaattagctcattgatgtaattctcacggttgccagcgtctcctccttcaacatagtggtttctcttcttcttcagaccacccaaaggcgccttgagcttgaagggccagaggaaattgttggcctccttaaaatgaggtcccacagtcatgatctcatggatgagatcttccacacagatgatgccaaacttgcccagagcctgctccacgattgcgttgtcagtcaaagcagttctctgtttgttcaacttcccaaaacctcttttgtaaatcaattccctcacactcttgagattagggtatccgtaagtcacataaggttcgaccagatgaagcatgttcattgttgccttgttcactttaaggaaaacaccattgaaaatctg

SEQ ID NO: 17054 - DNA, 553 bp, Gossypium hirsutum
  Clone ID: LIB3829-027-Q6-N6-D7
aatcattccactgcaaactaaacttgtattatttcaacaacgattcccatcttacactgatattacactaagacaacatatagcaaagtgaaaggaacatacacattcaacatatataaaatttcatctagaagtcttatttttctcagcataaaatggacttatcatgctaacacaagaacataggtctggaaaatatgttattcttacagtactctctccttctacgagtcttcaataacttggaagacgtcttgattcttcattaaattcatatcaaaagcaagcaggagacaacagtgatgcaaacaatgccaacagtggcaataattgaaccttggtcaaatgctctctgcaagctgccagcacctgagaaatgctggtaagccaaatacgctgcaatcaccaaggaaatgatagcgccttgttgtgttccccttaagttcattacatggagaggggccacaatcaccaagagtaatgctagaaatggcaactcaagttcaccaggaatgaagaagaagagacgaactagcagtcccaagaatgctgc

SEQ ID NO: 17055 - DNA, 550 bp, Gossypium hirsutum
  Clone ID: LIB3829-027-Q6-N6-D8
attacatatacacacatacattatgtattcccaatttgaattcatctgaaacaaagcaaatgtgtgaatacttactatatacatacatatatacacataaatacatatatgcatataatatatacaaatacatgtacctagaaatttgctctcctttagcaacattgttaagagaaacaagtgaaggggtgaaagcagttgcatcaaactgggaacgagtccggaaaaacttagttccacgaagatttttgcgcttctgattgtaacaaaccactgcatcattattgaataacatcaagatttccccattgttcaaaacaaccatgggttcatagaaatcccaactgccttgttttggatacaaattctcaatcacaaactgcttggtccaggactccttcacaccataatccttcataacccaaatatcgaatcgcgtcgagttcgtaaagtaaatcataaacagacaccctcctagcactccaatccttgagtaattagtgaacttcttatcggtttctcggaaatgatcaggcggtgggagcgtccc

SEQ ID NO: 17056 - DNA, 389 bp, Gossypium hirsutum
  Clone ID: LIB3829-027-Q6-N6-E1
ataattattaataaagtaagaaagaggggggggggcagggaggggctgggggagggggaaataatagaagataaaacaaataaaaaagaaaatggaagacaggagaaaacaacaaaaaaaaagaaaaagagaaaaaaagggggaaaaggaggagggagaggggaaaaaagaaaaaagagaaccaagagtcaaaaggggaagggggggaagggggggcaaaggggaaaacaaggaaacacaagaaaaaaagaaaaaaaaagaaagaattgctcccaaaaccaagcaaaagagaggaaaagggcggaggggctgaaagatagaaaaaaaaacaagcaacaaggagaaaaggggagaaaaaagggggaagaggggggaaggagggcgaaaag

SEQ ID NO: 17057 - DNA, 550 bp, Gossypium hirsutum
  Clone ID: LIB3829-027-Q6-N6-E10
cttaatgcaaacaatttccttttctcaaacaactttattacatgatgttttggctgctccttttacaacagtctccatatcatatctcatgttcctaaaaatgtatggctttcaaagcaaatcaaaagacagagatgagagcaaatattactaaaatatcgagttccatagcaatgtcagacaaaaataacactaggaatgctaattctttgataatatcatcacaccatcaccttagtagaccagctgagagttgcttgtttgtagacctctctgcagatcatagcatggttttagaagttcgagatactgataaaaagtctttaggagcataacatcactcaaagtctaagacggaagttatggaacttgagaattagaaacgagtagtgatctgggaaaaaagagccttaaaatcctttgttgggttgccaactccctcaggtttcgaggctaaatcaaacgccttaaatttggcctcctcaaatttcagtgcctgaatgcagacttctgctacatcaggtctggcaattgcttttgtttcagtctg

SEQ ID NO: 17058 - DNA, 510 bp, Gossypium hirsutum
  Clone ID: LIB3829-027-Q6-N6-E11
catgggggataatcttgtaggatcttaatgcatgttctaagcaaatggaagaggacattcttgtctgaaaataaacttatcattcttacacactctacgcatcttaaacatggcagacgatcagatctagggtcctccatttaaggaaagttaacataatattcctgccttatatagtagctttcatctgacacaatgctaaaatgttcttcactaaaactgaaacagcagcaatgaaccatgcacccccccataacattagactagttgaagagctatctggtcttgctgcagctgagggttataataattggtggcgggttgtaaagcatcgacttggaagtagttccgaaagtcatatggttgaaaatgtagggcctcgaagttagcacttgaacctccgggcatcaaattcatgctctgctgcttcctctcgttctcagctatcttggctcgaaaaagttggttattgttatgcaagtcaatttcccttttctgcatatactcaat

SEQ ID NO: 17059 - DNA, 528 bp, Gossypium hirsutum
  Clone ID: LIB3829-027-Q6-N6-E12
gaataattggaacccaatgtgactactggattccgggagttccttggaccaaaagtgggaaaaacctcagcagctgtacaaagtccccagcttgaagactggatagattagagattatttttttaaaatataaaaataatctctgttcgcattcagttagcggtaacaaaagaatgtaacgaatttttgctttttttctactttgtacaggtaacaaaagatttcatcccaagtgcaaaacagttaaatcctatactgtacattcaaaggatctaagctatgcatatatgaataggaagcaagaagaacaaaattacagctgcatgagattcagctgtgattggacattttaagttagcatgtcatggcggcagcagccgccgccgcttttatagaagcgcagagaacagcttaaggttaaaacttgttagcataaaccaacactggaacataaaatacgacttgggaggatcaattagcactctcattttgtactaaaaagaactgaggtgagcttgcttgtacgtt

SEQ ID NO: 17060 - DNA, 507 bp, Gossypium hirsutum
  Clone ID: LIB3829-027-Q6-N6-E2
aatattaaaaagctttgatatattactgcttccatcaaaaagaaacatgaggggttcaaggctaaagccataaataaaaaaattagtactaaacgttgcatatcatacaaccgtttaaaacaaactcaaggaagcaaaaaagcgagagagagtttaaaactcctgagaagctgatccgatatcccccttactttttccccctttactgggaagaagagtctggtgaatattaggcaaaacacctccatttgcaatggtgactgaacccaaaagcttacttagctcttcatcgttccttacagctagttgaatgtgccttggaactattcgattctttttattgtctctcgctgcgtttccagcgagctctaaaacctcagcagcaagatactctaatacggcggagagatagacgggagctccagcaccaacacgctcagcatattttccggctttcaagaacctagcgatcctccccactggaaactgaagcccagccttatgcga

SEQ ID NO: 17061 - DNA, 504 bp, Gossypium hirsutum
  Clone ID: LIB3829-027-Q6-N6-E3
caccagaattcacgcatgcttttcaccaaattaatgaaaaccaacacgaaataaattcgatggaattaccgaaccaattggcacggatgggaacattattatgaagtcaaaagctcgaaagcaaaactctagaagctctccatgatagcggaatgtttaaaagtagttgcttttatagaaattcttgaggaaaccagacgtgccttcatccttggggtccaaatcctgtgcaagcccttgacgacccagcacatactgcccgataatggggtgccgttgctttgcatgttcaacgatgttgttcagcttttccatacccttaaacagcagcaaatcaattaccttagggttagtaacatgagagttcttacggatctgggaggagatggaaaaacggagctcggatttggtgacgacgtcgtctaggttatagatatccataatagtggggattgaccgacaagcttgtctgaaaaaatcgaaaacccggttttttgcttttta

SEQ ID NO: 17062 - DNA, 496 bp, Gossypium hirsutum
  Clone ID: LIB3829-027-Q6-N6-E4
tttttttttttttttttttttttttttttttttttttttttttttttttttttttttttttttttttttttttttttttttttttttttttttttttttttttttttttttttttttttttttttttttttttttttttttttttttttaaaaaaaaaaaccccccccggagtttttcaaaaaaaaaaaaccttaaaaaaaaaaaaaagagaccccaaaaaaaaaaaaggggggggttttaaaaaaaaaagagaggggaaccccccaaaaaaaaaaaaaaaaagaagaagagagccccaaaaaaaaaaaacccccccttctgggggaaaaaaaaaaaaaaaccccaaaaaaaaggggaccccccgtttttcggaaaaggggccccaaaaaaaaaaaaaaaaaaaggggggggggaaaaatttttttttaaaaaaaaaaaaaggggggggaaaaaaaaaaaaaacattttaaaaaaaaaattttaatatttttgggg

SEQ ID NO: 17063 - DNA, 525 bp, Gossypium hirsutum
  Clone ID: LIB3829-027-Q6-N6-E5
aatgataatttattgtttattgatgtagtaagttgcatcgactagtttgaatgcgatgaggatgcttgatacagaggcattcgcaagtttactagtcttaatatggcatatagggaacgtgcacaacaatgtggtcttgaaaggtaaacaaaccccaccccatgtggccatgtgttatgcatgaggacttcatagagacttacgccattgtccagcaatttcatgttctttcaccctgcacacgtcttccagtatctaaatcagccagccttgatgatgatgggactggcattggtgttgataagccaactgattctgggatgtcaagattgactctcatagattcgtctgctattgtacgcttcatgtcaatctcatgaaattgctgaacttgaagttttactttgtcgataagttcaatatgatagatggatgaacgtgtatcagcaagtctcgattgcaattcatcgaacttttttcttctgtactcatcattctccatttgatttcccctctcacctaatt

SEQ ID NO: 17064 - DNA, 515 bp, Gossypium hirsutum
  Clone ID: LIB3829-027-Q6-N6-E6
ggcaaaccgatcgatactagcttcgactccactcgaaaaaaggactaatcttcctaatgcaaaggaaatatacaaatactagatataccaatatttcttaaccagtcagacacccaactaaactgagttacttccatttatagaactttatcttacatgggatcatgaatctttgatttcagtctctctccggagcattttctgaaacccttctcgcgctcaggctatctgtatacgaccacaccttctcaaattcactcgcgaacggtttttcaaatttccggtcaggttcttccttaatatcatttctcttcaaagaggaagctgctcgtcgtggacttccggtgagtggggttggagaacaaaaggtgggtgttgcgaaaggagaggcataaggagtctgttgaattgagaagggactaggagacaatcgcctttggattggacgaccactgaaaccgctcctgctgaaaagagaaactgtttctgccgcagcacgttgctttatagcatca

SEQ ID NO: 17065 - DNA, 525 bp, Gossypium hirsutum
  Clone ID: LIB3829-027-Q6-N6-E7
gaggaaaaaggaaggttttaactacaacatacaagcttatacaatacgagtcactttttgcttaagcataatcgaaaagggagtggcgccagatctttccacaggataaaaagggcatgttgacacggtgttctggcgaaccataagaggggaatgccctcaccaatgaatgtatatggcttggacctgcttaccaacctgaggtggatgaacactgtcccaaataagtgctggcaggattgggaacatgtaacaaacgaatccgaattgcttaagaattcatttaaccatacagtgcctgaaacacatcactctcttgttgattctacaaaaccatactttgaatggccattaacaacataaataagggtcttgcttatgtgaaaaaccacaatattgaaatcaggctgttgcttcaaaagattgggtgctgcttcatgctatctttcagttgaatagctgagcgtcacgaataaaacctggtcacacatgccttctcatggcaaccaaacaatgttcttggtg

SEQ ID NO: 17066 - DNA, 526 bp, Gossypium hirsutum
  Clone ID: LIB3829-027-Q6-N6-E8
gaaccaaatcagcacttgaacaacaagattaagtacaattgtgagggagaatacaattattaaatcaaagcaaattgttcaaggaatcctcacaagaaaaaaaaatccagattgactggttttaacatcttatttgtggagattaagacttcaagcagtaagctcaagatgcttgatgtgtgcgatctgctttcccgggttcagcccctttggacaagcacgagcacagttcaatattgtatggcaacgatacagcttaaactcatcatttatggcctccaatctctcctttgtgtattcatcacggctgtcgcttatccatctgtttgcatggagcaaagcagcaggacctagataagactcgggattccaccaatagctgggacagctagtgctacaacaagcacacaaaatacactcatacatcccatctagcttagctctatcctttttactctgcggaatctcttttcccgccgtcggcggcgggtttttcctcttcaaccacggttcaatactcttatac

SEQ ID NO: 17067 - DNA, 534 bp, Gossypium hirsutum
  Clone ID: LIB3829-027-Q6-N6-E9
aaacaatagaaactatatctccttaatataacataaatagagcatttcaaatccaacatctgagaacataaaaacttaattgtaatgttaccttaatcaaaaactgaaaacagcgatctataaataaaacctgacatgcaaaaaaggtaccagaaatataaaaaagtaaaattaagaacatattctatcacttaaagcacttggcatccaagagaggctctccctcaaatggctcgcagtcttcaatcatctgattcacccgttccttctgggctgcatctgacaggtcaaccttcttccactcgtagagttccatgtcatagcactcgtcaatcacaaattgaggaatctcttgcccacggaaaagccatagtcctttcaccttgaatggagggttagcaccgatcaccaacatcttcccaaatgcatacttgcgggccaaatccattctctgcaggaatcctccaaccttgttcattgtgacaaatgaaactgtattctcctcattgtacttgtagtcacaaaaccacagtg

SEQ ID NO: 17068 - DNA, 511 bp, Gossypium hirsutum
  Clone ID: LIB3829-027-Q6-N6-F1
acctaaaaaataaaggggctacttgcttcaataagtctatattattcaactacatgcgccatggaaaaacccttgtaacaacagggaaaaacatatgaatcttggttccaatgcttaaaaagttccaattacaacaagggttgatagcaaatggaactgccctcaccaatgaataaaaacaataggcctgagtaaaacttgaccttgtctaccgagattagaactggaactgcatataaggtgaatagccaatagcataaaaacctcgtatgccaatgaacccacctgacggaccaagtccttgccatcaaatatttaatgggcaagcaaataaaggaatgctttctaagactggatttgaatatcaacaacaggtcagccttgaaatgagacctgtaggagctcacatgccaaatttctttataccaatggaacaacaaagccaacaatgtcaacgacccggctttagaaggtgtggggctcctaatgatagcaagcaaccaaatgcatt

SEQ ID NO: 17069 - DNA, 544 bp, Gossypium hirsutum
  Clone ID: LIB3829-027-Q6-N6-F10
ctcaaaaaacattaagtcataaatcaagcactaccacttctttcctacttgacaagcagatattaatagcagtaaggcaaatgaaaggtgataatttgatgaaaaataaaaaactttgacaaacaaaagctcaaaatggggtgccaacttcactccttgtttctgaagggctatataaagcggatctgttccttggtctattgtcttccagctgcttcacaacttcatccatggtgggtctcacagaagctaccggagcacaacatcccattgcaagctttagtgcttgaactaacccgtcttccatcggacttcggatacctttcaacacttctacgtcgaaaacctccattgttgtctcttccaaaactgctgctttcacaatcgaaggcaaatccccaacatcgttgcttcttgcatttttcccaggcttcttgccgatcaaaatctccaataacagtatcccaaatgcataaacgtcagttctggtgttgcatttcttcatgctttgaagttccggtgccttgtaaccttcggtctttgc

SEQ ID NO: 17070 - DNA, 548 bp, Gossypium hirsutum
  unsure (1)..(548): unsure at all n locations; Clone ID: LIB3829-027-Q6-N6-F11
ggagtgaagattgcttccattttcagtaaaaactgaaacaagccaccaaaacttcagttctagaattcaaccatactgcagtngaaaaacaatcaaaatcaacaagcaaatgccaaagacagtaatccattacaacaaatgaacgtgccgttgactatcgtcattttcacattctgtcttctctcttccttggcgcacatgtgatgatttcatcaactctgagaatcatttcagcagcctcagttgcagatagcaatacggcttgcttgactttgaaggcttcagagattcctagctctgccatatctcctacagatccagagatgacatcaatccctgcattgcatccctccttgtggtgctctgcacgaagcttagctactaagtctgcactgtctagaccagcattgtcagcaataattgttgggatggccaaaagcgcacgcgagaaagcttcaatagcatgagacttcttccccggagtcttccgtgccaattcatccacttcctttgccattaccatctcaggccatccacccccaagcaat

SEQ ID NO: 17071 - DNA, 537 bp, Gossypium hirsutum
  Clone ID: LIB3829-027-Q6-N6-F2
agaagtaataaataacttgagaattatatttcacatccaaatataatattcatatattaacaaaaagttacatatgtatttgatgttctaaccaaaaaaatggtttctcaatgcctacatctatctatattttacaaattaaactctaataccaactccaaccatttggtttggggagtactggaatttggtaatgaacaagggaatatgtacaatgatccatgtaacacggactttttgttaagtcatactagaagacaccaatcctaaactcgagagttcctcagggggcacaacaacagtgtactgaaatgcaacctgcactataggtagttcagaagaatgtctgcaaaggaaaaatgatattaaaatatctaaataatataacagtaatgctccacaaattactatcaacaaaaaaaggtagcacaaccacaaaacactgaaagggagcatgtttcaagcatttaggtgggcccatctggtgcaggcaagaaattgatacaatgagaaaaaaaaataatcataataacattg

SEQ ID NO: 17072 - DNA, 558 bp, Gossypium hirsutum
  Clone ID: LIB3829-027-Q6-N6-F4
actgggaacttccatctatgaataaatgattttcacacaattgtaattcgagaattatggcttttccaaactaaggggcggggattttctggcaacattgatccatttcgatgagaaatgacatgaagtcccttatactgttgccattaagggatcatttccgatgctctagacaaatccacgacacaagggatgtgtaatatctgattgaagcctctcccaacatgggagacccaagcaaaatgcagatgcttccaatgatgcagtgacttctatgactcttccaacagtctccccatgaagcagcgacttctttaactcttccaacccattgtgcgaaggtcgctctgttttagctcgatatgcttccctatcccgagatctgctggaagtctgaaaccacctatgcgaacacgcttcaatgaatgaatctcaagcccagcatttttcacaagttcacggacttcatgattccttccttcatgaaccacaatacgaatgcgaggtctagacaaatctggctgcgttgggagtaattccacagaatcagggacacaa

SEQ ID NO: 17073 - DNA, 556 bp, Gossypium hirsutum
  Clone ID: LIB3829-027-Q6-N6-F7
cgaaccgaagacattgatatgatattttgatttaaatagtccagtcttctcaatcactaaacagaatttagagcataacattaagagtagtttaaagagggggatgggggaaatgactcctaagcgcttccatttgacttaaaacttattattacaacactaactgttacatttttggctcaattattgatgcaagccaacgcctatctctctctctatcttccctaaccaatgcaaaactaaatgacaaagactttcaaggcttgaaggccgaaaaggcaaccactgagttgtgtccaccaaatccgaatgaattcgaaattgattaacttcgtgctgtttcttctggttggccacagtgtcaaactcaactgaaggctctggattaaattgatttatggagggatgcagccatcctgttgtgatggccttcactgtggcaatggcttctaaaccacccgatgcgcccagacaatgccctatcatggactttgttgcattgattttgatgtctgatgtattcttgaatacctttttaatagcattgatctcagct

SEQ ID NO: 17074 - DNA, 534 bp, Gossypium hirsutum
  Clone ID: LIB3829-027-Q6-N6-F8
aaaacctaagccgtttgatgttttcccacggcgaagaaagaagcaaccatttctattacaaagcattaatgttacaacagtatcaagcgtaaattgaaaactggcattaccgaaggatacggtgaaagcggtctcggagtccctgagcttcctttcgctttggattctgattcaggtactgcattaatttgggtaggcgtttctgctgatacttcgcttttaggctctgggtttgcctctgtaggtgccggaagagccttactagttgtagttgttggtattaaggccacccctatttgctttatatcgtcgacaagctcgttcggagccacttttgtgcttaagaattcatcgacttgttgaagtgttttctttcggtcctctgcaaacagaagcttcttgcttagaagctgaataatagcagcagagcctaaaacttgaagtattgtttctatctctgaaaatgctaataagcctaatccggtagctgcagcgatccctagtgtaacagacaagccatccgattcatccccg

SEQ ID NO: 17075 - DNA, 538 bp, Gossypium hirsutum
  Clone ID: LIB3829-027-Q6-N6-G1
gtaggacatgaggtgatagaaattcataatcaaaatagatgacaaacgccacacggttttgccttcatttgtagagcatgaagttattcgaatattatcacaatagcacaacagtcaaacaccataatcattggggaagcgtcaaagcgcttcacttgagcagccccttagacttcaaatattccacggtttggtcgtagatttcctcgatcccatacttaaagctgaatccttcgctaataagcttctctgaggaaatgatcaacttgggtttggaggggaaatctccaaaatcggtagggactttgaagtcagggtatcttttgttgaggaactttgctagttctggcacactggtattgacagcactgcatatatatcgacccgatgcagattctttttcagccagaaaaacatgggctcggcattcgtcttccacatgtgtgatagagatcgaacctgacagcatctgcattcctttcaaagcatttatgaggaattcattgcctgaaatcaaagatgtagcaaggcctatgct

SEQ ID NO: 17076 - DNA, 407 bp, Gossypium hirsutum
  Clone ID: LIB3829-027-Q6-N6-G10
aagttgaaattcctaggtgagggtttttttaccctttacaaacaaactatcgaaaattcatccttgatattctaggatgtatggaaacaccattttttgaactacccttccaagggaaacaaaaaaaagggccccccgtatgcctgttgaattttcacccaccattgtaactttttttaaccatttaaccataatatcgcatacactgtttgtttgggtgattcttattctcaaaccaccttaaaagaaataagccgcgcctatggaaagatgaaatccaattgctgatgttaggtcttataaccctgggaagggaaaacaaattttggaaacctggtggtgaaacatcttaaggtttgtaaggtagattttttttaaaaagaataccatttgttaaaacaaaggtt

SEQ ID NO: 17077 - DNA, 530 bp, Gossypium hirsutum
  Clone ID: LIB3829-027-Q6-N6-G11
aatcaatcactcctatgtatttctgagtaaaaaatggtacaacaatggcactagcaaacagtattatcagtgagggcctacacccttcctgctatccccaacaaacaagacactggttcgacattcttcaacttgatggttggcatccgtataggatatacacatttggaaacataaataatatcaatggttttacatttaagatgtttcccataccttgtaatccctcccttcaagggccaaggaccatctttgggaaccactaggaggctcgtaataacctggtccgatcttcatcgcaaccttttcatcaataattgcagcatacacatccctctctgccttgacgattttaactaaactccggcaatggattccgtttctgtttctgacagagataaggctggcaatctcagatcgatgatgagagaaaatatgatcatagaacacagccggcgttcctgggtgagtcaagatataagcatatccttccatttcctttccacctgggaacctccaatgaccctggg

SEQ ID NO: 17078 - DNA, 426 bp, Gossypium hirsutum
  Clone ID: LIB3829-027-Q6-N6-G12
aaatgctaaaactctttagtcatacgtaagttctgcttcagttcacaagttctaatataagttgtttcaaattatacacttttgtaggtagcacgataccacacattatctttctacaaagggatcaataggaggaacagcagtgtgtggataaaaccaaagaccacatacttccccatatgataaccccttaaccaaaccaaagccaagaatgatttgcctgagagacgccactctgggaaggattccgccacccaacatctaagggacaaatacctccagcgctgcctcaagaaggaatctcatttaattgaaggggacccatgttgtgccccattcccttgcaccatatccctctgctggtggaagtagttacccgtctcagcatcattagatgataagtggggtgtaccgttacttaaaggc

SEQ ID NO: 17079 - DNA, 75 bp, Gossypium hirsutum
  Clone ID: LIB3829-027-Q6-N6-G2
cccaaagcccatttacattggcccaaaagacccaaattccatcagcccaaattttagaccctaccccaaatgggc

SEQ ID NO: 17080 - DNA, 530 bp, Gossypium hirsutum
  Clone ID: LIB3829-027-Q6-N6-G3
caagattagataaaaatattaacaatagaagaaagaaccatcattcaatcaactacaaaaaaatatcatcttttatcctcttcagtgtttgtctagaatataagctctccacttttgaaattataaaggcagcacaaccaaccttcccctccatttctacatcattttgagcatgccatatcccattgtcaacattactaccttctcttcaccaaccaaaatctaatgaaaaagcttatattcaatatagatctttaaatggactgccggcattgcagggacattgacttcatcgtaatacaaactctgttcatccaaagccaaacccttcactagcttcatggatagccagcagcagacgttcctgaagctgttcctttgatgaatactcaggaagatctaactgattaaagcatgtatgggcagaaggcagccgctcaggagctccaaaagccttgtgaatctgaaatttttgtggaccagagataccctgcagtgccttaaaaccctccaatggcacctttgatgtt

SEQ ID NO: 17081 - DNA, 532 bp, Gossypium hirsutum
  Clone ID: LIB3829-027-Q6-N6-G4
acttaaggttagttatgaatcttaaattaaaaataggggcctaatataaggtctcatatgctagtcttttaggtctatttagcccatataacccatagtcatagtcagacatgaactctaaacatatagagaaacatactaataaaaaccgaactcatcgaatagcctgatacttctttcatatctgaaatagctacctacaatggcgggaaatgcggctaacgtgggcatcgatattaactaagaaagttgattgaatggttgtgcggacaattcaggagtaaaagccaacatcatatggagccttaagcaataggaactcccgaaaacggtcgtcgacgtcgctagtatgcatgcgggacttgggggaagcatcttcttgttgtacgatctgccagtttactggcaaggcatgttgaaaaccttgtgggattgcattcattgctggctgaccaatactggtaaggctgacatgcataatggggtaggtaagtgaaccgtgtctcgattcacttgaaatctgggaatcatt

SEQ ID NO: 17082 - DNA, 528 bp, Gossypium hirsutum
  Clone ID: LIB3829-027-Q6-N6-G5
gaagaagacaggagaggttcatattataagcacaaaaatagacatcaaagccttcagttgttggggacttgaacattacacgtcgttgccatttccttttgacatcttgcaaatatatctgataggattttaattcatagcatattaatgcaaaagttttacaatgcatctttcacatgacatgaacgcatttattcatatgtggctaatgccatttcctactttttccccaactggacttaacacccaccacagcttgcgctctatggaaaaatctccggaaacgtgcatcacaaaccctactactactacatttgcactcggctagcattttgtttatggggagcctgcttgttcacaaaggtccattagatccaaagtctcaggaactgacagctcaagacggaacttgggaccatcatagtggtgcaagactggcctaaaagcatcctcttccaatgccttgcataccttccttatacggatcctcacctgagcaggaaacctcgactcgcctttacacttttt

SEQ ID NO: 17083 - DNA, 528 bp, Gossypium hirsutum
  unsure (1)..(528): unsure at all n locations; Clone ID: LIB3829-027-Q6-N6-G6
gaagnaaaagtttcaagatgatgtcctagttttttatttatttatttagggtttacaattagatgaactcttctaaaatgagttgttcttaactaaagagtgatacattctgtgattgtgtactaatctgatgaaccagcttattttctgctgtaagcttgtgtttgtgctactaagagacgaataaaacaaatggtgtttgaacttatttgaaaagtacataggaacttcagaattttacataagcataaagtcctagatatatttttcacttggaaagggcaacagactatgggcgctcggctttccatcaccggttcagcacagaacagaatcagcctctggaaggattcaaagttaaactgttttatatgacagttccatctcggatggttgcattcttcattatcactgtgatcccagacctaatgtaaaacccatcttctggtctctcagcttcttcaacagcatcagtgtttgatatgattacatcttttcctatcttggcattcttgtcaattatgcaat

SEQ ID NO: 17084 - DNA, 451 bp, Gossypium hirsutum
  Clone ID: LIB3829-027-Q6-N6-G7
aaaaaaagaccccccaaaatctataaggggaaaaaatattttacgcattaaaaaaacgggttatgcccaaaccaaatggccccccagggctaaaaagggaaaaaggacatccaaaacaaaaaggggaaacgttaaaaccgggttttatcctaaaaaaaaacaaagggggggttgggctgggcaaaaaaaaaaaaaaatagttccggggggggggccgggaggagcccaaaacaaatttggggagggaaaacacaaacaggtccgggaccaggggggaaaaacacagggggggacttaaaagcacccccaattttttttaggggggaaaaggacgggggaaccaggaccaaatccaaaaaatcctttggagaaggccccgggacattaacggaaaatccaagccccctttttcgaaaacaaaaaaaaattgtttggcgtgggggaaggaaac

SEQ ID NO: 17085 - DNA, 514 bp, Gossypium hirsutum
  Clone ID: LIB3829-027-Q6-N6-G8
gaacaatcaaatttcttgtacaagaacaaaaactaatcattctaggagattcccttcagcttaacgtttgacatatagggagtaaaggaacacactctccaaaacacaacaatgaacattttcatcaaatactaactctagctttctgcaatggaggctccatgcctttatgttgacaaaggaaatatagtctctttggccgacccaagctggaagcactgcaaattaatttaatgctcttatttaattgcaaggggattccctttacccgattatgttgtcctttcgaaagcactgccaatgtgcaaccactctggtgatgtgccaccactgtattcccttatcacttgcgaaccgaatgccataccagtagcatcaaacgcttgttggccataatctttacgaggaaatacttcaatggcagggtttattcctgaattaactgcttcaagcttcattgataggaactcgacctgacgctgtagtgattgaatgtaattaattatctcatcaa

SEQ ID NO: 17086 - DNA, 498 bp, Gossypium hirsutum
  Clone ID: LIB3829-027-Q6-N6-G9
acttaatcatttcaaaatcattcatcggttgatgatgaagaatatgaaactcgaaatcaaaagtagagccaaattttaaacgaaaatatgagaactccatagaaaggacgaccgtttacataaggacttttgcgaaaaagcaaattccaaaaacgggtaccaaacactagatctaacctaatttcacaatcaatcaagtaaatacaaacgatctaagctctttcacctctgatcctcctagcaagctggatatccttgggcatgatagtaaccctcttagcatgaattgcacaaaggttagtgtcttcaaacaatccgacgagataagcctccgcagcttcttgaaaagcagcgacggcgctgctttggaaccttaaatcagtcttgaaatcttgagcgatttccctcaccagcctctggaaaggaagcttcctgatcaacaattcggggctcttctggtacttacggatctctctcaaaaccacggttcctggcctg

SEQ ID NO: 17087 - DNA, 537 bp, Gossypium hirsutum
  Clone ID: LIB3829-027-Q6-N6-H1
tttttttttttttttttttttttttttttttttttttttttttttttttttttttttttttttttttttttttttttattgttttttttttgttttaaaaaattttttaaaaattttttttttttttttgagaagaaaaaaaaaaaaaaaaaaaaaaaaaaaaggaaaaaaaagggaaaaaaaaaaacgggaaaaaaggggttaaaaaaaaaaaaaaagggaaaagggaaaaaaataaaaaaaaacaactgaggttaaaaaagaaaaaagaacccgcgttaaaaaaaggaaacaaaaaaaaaaaagggagaagaaagaaaaaaaaaaaaaaaaagcctttgggaagaagaaaaaaaaaaacttgcgggaagggggggaccaaaaaaaagggggaagggaaaaagggcaaaaaaaaaaaaaccgcgggggggggaaaaaaaaaaaaggggggccattatatacctttgggggggggaaaaatgttggggggagggtaaaaaaaaaaaacaccctgttttctggcccccggggcggcct

SEQ ID NO: 17088 - DNA, 554 bp, Gossypium hirsutum
  Clone ID: LIB3829-027-Q6-N6-H10
aatgcgaaagcaagcaaggaccataattttaatatataaagctttttgtcaagtcttccattgtcatatatataaacttaatcaatcacatgccttttgtctgtggctcaaggtctcaatagtcttaccagcaaattcagtcactgcagtagtgtttatgtcaatgcagtatattatgcatatgctcttgaaactatttttacacattttccaacatcaagaagcatttttggctactagtttgtggccattgaccacattgctgaaaccaaaaaatttagagcatccatccagggataaacccattgacttgctgagcatgagttgttgcagccatctggtctgaagcaacaggattgcagtaccctatctgcaaagttggattgcattccaatggctgaaacaaccccatagattgagcctgctggttagtgaatgctacactttgctcaccaccttcccatgatactcggaactggtttctggcactaacttcttcaagctttattgacaaggccctgttagtttccattagcatttgttccttattctga

SEQ ID NO: 17089 - DNA, 467 bp, Gossypium hirsutum
  Clone ID: LIB3829-027-Q6-N6-H3
ggaaaaaacaagaatgcttgaattggcccctaaaccttttttttggtaaagctacaagactttcaaattacatgcaagttggaatgaaaatgtccaacagaaagaaatccccacaatacaataaataactcctctggtttattatacaacatatcacactggttacaattagcctggaatttccttgaaagcaattaaaatgacgttttagttacatcaaagtttatgaactcgatgttattgctttgaaatctaagatggaaaatatttagaagagtagaaatttgaaatcgaaaagagcagcagcaatgaactattatcagttttttttaaacgcttaaaccattagtttatagaaagcaaatccaccttgatgacagccaggcatttttaatggcatatgctctacttcaatcattgaaactgtataaaggtgaggggattcatagccatcttgggccttaaaa

SEQ ID NO: 17090 - DNA, 504 bp, Gossypium hirsutum
  Clone ID: LIB3829-027-Q6-N6-H4
cagaaagttccatttatgtcattttcattaaacattagtgatcctgaaaatagaaatgaaaaaaacagttctcatcattcttcgggatgcattaacatttcttaagaacccaaaacaaaaatcagtaattaacccccaaaaaaccccaaaaagaaaaagggagccatatcatagagtagatcctgggcaggctaatttcatatcctcatatagatataacattcacagagctagaactatagcagtatgttttataaaggggataacaaaccactcaaaatatagatttcttcatcctctcctctctccttggcccttttcttcattgatgatctccaccacctttcccttctcttctttttttttttttggaactattcatatatatatatgggagatatgtttttgtttatttcctttggggggggatttaagcagctgcaactgtgctagttcaaatagagtaaccttgagcttcattcggagatgtagactccctttggc

SEQ ID NO: 17091 - DNA, 569 bp, Gossypium hirsutum
  unsure (1)..(569): unsure at all n locations; Clone ID: LIB3829-027-Q6-N6-H7
attacagtattaaaacttatataaatatataatatgttacacaagtatgacactaagaaataatgaattgccagaaatcaacattttattataaaatataaataggatcaaatgatagtgtgatttagaaagagttatgagaacaaaactttcggtgctgtacagagataaaccctaaatcaagtgcaaatatctactagcttatactatttgatgtgttcttccactcatgtccgaaaattcaagagctaaacgcttatgttgaatttctaacatcggaccaattgcgatcacagacacattttcagtctcatcgcatctgttacggtggcggattgatgaccgagtcgaaatcgtaaaataacgatcataacttatctctctatttagttacctgatctgaggcatgcgataggatcggtttagagatccaaaactctttgtggatatgtgaacttaatgtctctcaatcaactcaggcaagattggtaaggaaaagattcgttgtatggcattaccatggctcgnagttgttgccaagaaaattacggccataaatcggttggcac

SEQ ID NO: 17092 - DNA, 498 bp, Gossypium hirsutum
  Clone ID: LIB3829-028-Q6-N6-A1
aggaataggaatttatttcattaacaaagcaagcttttacaagataatttattctctcatcacataatataaaactccatataaagaactctcttttttttttttagagagagagagttctatatgggcactcttgataaccgggaaagggagcttaagtaggcccataaatataacacatagtaggacaaaacattagagttttgatccttggttgggcaaatatacagcagcaacactcttttaagcatccaaatgaatcatgcatttcaaacctataccctggagcatgtagtcgaatgccttgtttatatcggcaaaaggcacaaagtgtgtgatgaacttgtccatatccagccccagctccttgttcaaatatttgtcgacaaccataggaatatcagtgggtggtttatagttgccataaaaagcacccttaagggtcctctcacttagtagattcattggatgagttttgaatgcatcggctttctttgg

SEQ ID NO: 17093 - DNA, 538 bp, Gossypium hirsutum
  Clone ID: LIB3829-028-Q6-N6-A10
ctcaaaacttagtacggtttgaagtctgaacagaacagaatgtctagaagtagacaaccaatatttgactacatgaaacagataagaactgtgcatagaaatagaggttgccattaaaatggagacctgaagtaaccattgaaatccttagtcgagcaaatcagacactgaagtcctcctgaatgcatcaacttgaggcaacagagcagctaaggacttattagggaatatgttatctgctttcattctctccctgatcccataagctggagctttggcatttatatacgctctgactagagtttggaactgactaactcgagctacatatccggcctgtctcattctatgtaacattttttcggcgttatggatatcacccttcctagcatactgctccatcacaaccatgaaagtagtaaacatgggcttaatttcattttgctggcatgccttctgcaagattgagtcagccttttccacatcccctgcttccacatgaagcttcacaagagcatcccaagtgaatgggccaatc

SEQ ID NO: 17094 - DNA, 548 bp, Gossypium hirsutum
  Clone ID: LIB3829-028-Q6-N6-A11
agaaagatcttactatcaacacttaaatttccagatgcaatttgttcactagaaagcagtcttgtacatattccactagtacttaatctagaccattagatgttaaaaagtatgatgcagaagaccaaccatcagcaagatttgtataccaaacccaacacgttcacaatgaaaattgtaccataatagcatctcgccaacattatgaagggtaaaccagaatcatcaggtcaatccataagaactctttcggtatccagcagcttaggtctcagcaatctcgtcattttcaagcacactaaccaactcatactcgacaagcgatagattgttatcctctttaacaacaaagttggcagggtcagtgacctcgatgcggccccatttgtcgacagccagcctcatagaacccttaaacatatcgatcttcgcattacgaagaattacagtgtcatcgggcttcatcaagtcaacttgctcattacgagcagtgaagaggacagtgccggtctcgtctcctacaaggcactcagcgatgcgggtttggc

SEQ ID NO: 17095 - DNA, 535 bp, Gossypium hirsutum
  Clone ID: LIB3829-028-Q6-N6-A12
atggaataaattgtatattatttattacgaaagagctttttagtccatcgaaatctcccacaaactcaattcaacatgttcaacaaaataaaactgcaaatacccatattcatcaagcaacaactgcccataaactactgagagatgacaaaacccaatacattcattttgtggaggcaaatgttgttggcttcattctattccgcaaccatcagcttatgcatcagcaaatcctagctcagagagcttcaggtgagcttcggtgtagtcagcaaagaaggcatcctcatcggcagcatatttttcaaccaatggacggaaaacaggatctgacaggagaactttgtcagttggtagttgaagaaggccttccttctctcccgacaaaagctccttgaagtaagagttgtcaaagatgagagggttggtagtccatggtccctcaaacccggacctctccttgtggcaccttcccagagtgtggccaccagaaagagcaacaatgtgctggtcactgagacccatttgagcacta

SEQ ID NO: 17096 - DNA, 527 bp, Gossypium hirsutum
  Clone ID: LIB3829-028-Q6-N6-A3
aacagtgaacaagcgttgttttattaatgataatttgataacaatattgttgaaaaataccaatttgtttagagctactgaagtctctgtttctccaggtttatgaaagcaaatacatgaatggttacctttcccagttggcataattccagtaggggtgaaagtagagtacttcctcctcaagttgaactccaaacttgctgtcaaccttatccttcaccaaagcaatgagattgagcatgtcttgagaagtggaggcaccattattaactaagaaattggcatggatattggaaaccattgctcctcctatgctacaccctttcaatccagctttatcaatcaactcagctgctgaaacacccaaattcaccggattccgaaacactgacccagcgctgcgttcatttactggttgagttgctcttggcctcttcaaaagctcttgttgccttttcttagctgaccctgagcgctctaaccggaacgtagcagccacgattgctgccaagttgtccatgtcctga

SEQ ID NO: 17097 - DNA, 523 bp, Gossypium hirsutum
  Clone ID: LIB3829-028-Q6-N6-A4
aattccacaaattcagatataatgaaatataatcggtgtttaggacaaaagaacggtgttcctaaccaaaacaacactgaacatgacacttgaaccaggttggggttaatagattgtaaaatcgtgtaccaaaaagtgactgtaaaaacactactgcatgacctatttccttttattaagaacctttttcatttcttcaaccttctttagaaggttagatatcatcttatcctgcaacacaattttagcatctttctcctgcagttcttgcttcaatcgttctatctcttttaagtgatcatcaagttgactgttatcttccataactttcttcgtgattttctcatccgtcttcagctttttggattcaatcgatgtctcctcgccctcgaatgctcttttattcgacaaaacttcacggtgagaatcttcctgtgccattttacggatgtataaactagcagttgatccatcgccaaactgaaagctaacaagtttctgtggtagtccatgcgaatccttt

SEQ ID NO: 17098 - DNA, 554 bp, Gossypium hirsutum
  Clone ID: LIB3829-028-Q6-N6-A5
ataaataagaaatgcaagttttattttaaaactcaaagtttttttctacaaaaactcaaatagtttcctataaaaacctacgtaattctttgacaaaacttaatcttaatttagtttttgaaaatacaaataaaaaataaaaattcatttttaattgtaatacaaaattattgcccggggcccaaaatcatttacacagcccaaattaaatacaatcaaacccaataaaacttgggccaatcccaacccaattacaaggcccaattggcctgaagtcacagaaaccctaagcagcagatcgccgcagctgctcccgcacgtcgcccttgcacgtcacacacgttgtcccgcgctccagcacgttcttcctgcagcagacaacaaacctcggccacgaacaatagtagaaaaatacaatgaaaatgtaaaaagggaggacagtttttagagaatggcttttttctattttttcggctatataaagccaattgtttttttgtaaaaaggtgacatttttttatatctagaaaacgattgaaaagaaataaaaagca

SEQ ID NO: 17099 - DNA, 535 bp, Gossypium hirsutum
  Clone ID: LIB3829-028-Q6-N6-A6
atggaataaattgtatattatttattacgaaagagctttttagtccatcgtaaatctcccaaaaactcagttcaacatgttcaacaaaataaaactgcaaatacccgtattcatcaagcaacaactgcccataaactactgagcagatgacaaaacccaatacattcattttggggaggcaaatgttgatggcttcattctgttccgcaaccatcagcttatgcatgagcaaatgctagctcaaagagcttcaggtgagcttcggtgtggtcagcaaagaaggcatgctcatcggcagcatatttttcaaccaatggacggaaaacaggatctgacaggagaactttgacagttggtagttgaagaaggccttacttctctcccgacaaaagtctccttgaagtaagagttgtcaaagatgagagggttggtagtacatgggccctcaaacccggacctgtacttgcggcaccttcccagagtgtggccaccacaaagagcaacaatgtgctggccactgggacccatttgagca

SEQ ID NO: 17100 - DNA, 538 bp, Gossypium hirsutum
  Clone ID: LIB3829-028-Q6-N6-A7
ggaagaaaaataaggaagttttcattaaacctgataaaattctttacatttatgggcataaacaaaaaaacaaaaaccttaaatacatatagtatgaccccataaccaaaaaagaaacaacaaataggactaaaaatataccacacttagacaccgttttttaacctacttaactatgaacataaggttcaaacagtttcacacatggatttggatcaaactgcatgatatccgctgcgcgttcgaactcttctcgtaatacccttatgctaaacttgtccaccactctgcccagatcgtgagatgtctcgaatggatcctctatgcagattaagtgccgatcgttgccaattctcctcgtccaatccttttcttgcttactgattatgcttcctgtccgaacagatattactgaatttgcgtaatcatgaccgtatgcccaatagttgaagaaaccccaaaccagttgagcaacagtttccttgttagaagatccgaagttgtgaagtttttcgatttggtcaaagtaagcacactc

SEQ ID NO: 17101 - DNA, 556 bp, Gossypium hirsutum
  Clone ID: LIB3829-028-Q6-N6-A8
gaaattaagttgtcgttaatagcattaatttctacaatagtcatatcaggatcgagtagatccatctcgccaatacaaaccatatatcaaaataaatatgcagaaatttcagaaaaataaacataaaaaccacaccgatctaatttaaaaagcaacctcctaaccctaaccccaactacagatcaactaatagccttttcaagatgaagtaaacttggtcacggccttggtaccttcagaaacggcgtgcttggcaagctcaccgggaagtacaagcctaacagcggtctggatttccctggaagtgatggtgggtttcttgttgtacctcgcgagcctagaggcttcctgagcaagcttctcgaagatatcgttgatgaaactgttcatgatccccatagctttgctagagatcccgatgtcagggtgaacttgcttcaggaccttgaagatgtagatcttgtaggtctcgacgctcttcttaactctcttcttcttcttggctccggcagccgctccgccttccttgggaagctttttaccagccttaggcttc

SEQ ID NO: 17102 - DNA, 527 bp, Gossypium hirsutum
  Clone ID: LIB3829-028-Q6-N6-A9
atgtatcatcatgacagattggcatatatctttatatattagttatacagcatacaagttaatacgggaaatcggatcaagtacaacacatctagcacaaacgttaaaaaggacctcattctccatggaaaatggtaagtcagctgcttcttcatgttgacaccaacagaatcttgcgtgctcaaaatttgaaaccctttttcttcgattttccctctttctcctgcatctttcgcttccttttcttctcattctcagccaccatatcactaaagtcctctcgctgactgcgtagcttctcctcttccctagcttcttcatactttgcaggcaacacattgtccataacttccaactcctctggctgtaaactgacttccaccctgtcagatttttgacccttcagaagatcaacccttttggctgctgacttgtcttgggtgccagtgttaaccacatatgtgtgagttgtgccaagtaaagtcccaggagcaatcctctcttctttttcttcaagcacttggtaa

SEQ ID NO: 17103 - DNA, 529 bp, Gossypium hirsutum
  Clone ID: LIB3829-028-Q6-N6-B1
attaaaaaaaagcttattaaaacataaaaaattcaaatcccaaaacaaaatacaaccaacaattaaacatgctaaatgatatataattcatgtgttaaacaggaacagcaggcctgagggagatgagtgctttcttaattctctcaaaagcagcttgtaaggtggtgagggatgctgcatatgatatccgaatgcagctatcatccccaaatgcatctccagggactagtgcaacctgagccttgtccaggaagtatcgacaaagtgactccgaattttcgattttgccaaaaccttcagcttctattccgtagtaggagctgaaatcaatgaatagatagaaagctccctgaggttctgatatcttaacaccttccaattccccaaagctcttaaccaagaaatctcgccgttccctgaatgcttccaccatggtggaaattgcttccccaccagcacagcccaagcctaatgcggcaactcctgctttttgtgctatactactagctcctgaagtggactgactctg

SEQ ID NO: 17104 - DNA, 509 bp, Gossypium hirsutum
  Clone ID: LIB3829-028-Q6-N6-B10
gttggtcttttaaataatttctagtcttaccggaccggttgcatctatgtatggcttctatatggaatgggctttgcttccttacctaaaaaaaaaaaaaaaaaggcgggccgcccgccctttttttttttttttttttgtcaagtccataccttattatactcaacagtcaggaatccagagcagcccaaccattttttttttgtctccacaccaaagaaaaacgaaaccgaaccaacaacacaaagcaaatgggaatggtgttagttaacgaggcaaagaaaactgaacacctcaccttaccttacatgaactaaaaccctaccctatctacaataaaagtaaggccaacccgggcactgtccttccttgaaaggaaaaccttcacctaacctacagttttgttttttggaccccccaaccctcataccttttaacttttgcattgaataacttaactaaatctggcctggcatgacaatccaagcctctggctttgtgtctggcct

SEQ ID NO: 17105 - DNA, 549 bp, Gossypium hirsutum
  Clone ID: LIB3829-028-Q6-N6-B2
gcaacttacatatcactgacatgaccttgtaatttttaagaatgatctaaattcgctacatcattgatgaccctttttcctaatgttcattttcatagcatcttctacatctctataaatgaggtactttggaaagtcattgaaccaactggaatatcccagttcgcaaaaaataccagaccgaaacttaccaccagagatcatggaatagactcaagattatcctaaatgaatataggttgttaacagcttcagattacaacattactctgggcaaacctttacaagcaaatcctcgagctctttgctgatttcaatcgcatcatcctccaaccttcggcgcatgtcgggagccaccttaccagcagcaacataaagtcttagcaactgatggtacacctcggaatcaagacaattgttattctttagatgcttgcagaactcctcggcggccttgacatcaccctcattcatgaaataatcaaaaaaagcagtcatggtttcgggattcacagggctccagtccttgacctcagaaaccgctgcttc

SEQ ID NO: 17106 - DNA, 281 bp, Gossypium hirsutum
  Clone ID: LIB3829-028-Q6-N6-B3
ttttagttcacattgagtcaaaaaagcatcatggatatatgaaatagtacaggtgatagtataaaggatactcatcttatacacatctattatcatatgaaaaaaaactattatagctttctttggttatatagtttaacttttgtttcttccatacacacttactgagaaagagattttttataagacctttacaacctatacttatttgaattttctatacaagcaatatccacaaaggctgttgtaggagcagcaaacttatcaagcacgtgtttcac

SEQ ID NO: 17107 - DNA, 443 bp, Gossypium hirsutum
  Clone ID: LIB3829-028-Q6-N6-B4
ggggcaaataacaactatattatatcatataccaatggggattgcatctttaggaaacaaaaacctgcaccgggcctggggttaatttttgcgaaccctaaaaccaacttttcctttaccttggaaatgggaatataaataaccgaatgtttatgtacccgctgccaccttttattcaaattcctcgctttcctactttctagcccaaaaaatggccgcttaaagatctcaagcctaaccttaaccctacaaagaatttccatttccaactaaaaggcttataacccaccaccccctgcaataattttaaaccttttaccccttcccccactaatttttcacaataaaaagcttttttaatatcacattgatactcaaattcttatttaacttggggatgtttgtaagggaaacaattgaaagtccattatgcggacttttta

SEQ ID NO: 17108 - DNA, 531 bp, Gossypium hirsutum
  Clone ID: LIB3829-028-Q6-N6-B7
gttcttagccctttccacatctttttcttctctcttttcagaaacttttacaaacctagttttccgatcaattttccgacgagttcatcattatttgttgtcgccgaccaacttctttcactttccaaaaactatcagaaatagaccttcatcttctctctttgatactctaattaatttctcctaaatcaacctctaaaatagcaaatctaattttaaagagaaaaaataaataaaaatcccaacttttcacttttatgtctctactggagataatcgaccgttttttgatgattgcatgtttgtgtttgaggaagatgctgattttatggtcttctttgtttgctcacaggagagattaccttgtaacctgctattcctgttggattgaaagctgattttgtaaggtaagaaagagtaatttccactaaaactccaactggcaatggaactgttgccatcctgtcttgcctatttgatcaagactttccttcctgtcttaggaaagaaagtgtttaggcctattaactc

SEQ ID NO: 17109 - DNA, 540 bp, Gossypium hirsutum
  Clone ID: LIB3829-028-Q6-N6-C1
agttgccaaaaacaagtgatctccatgataaaatgaaaatcaagtggaaatattcatttcatgatgatacaacaaacaagccaatccagtatgttttagcctagaaagcatagtgacatgcaccccacaccttattttagcttccatgttaaagggaagtatacatactctacaatccatgtaaactgcattaagtttaccattcaatgaatcaaactggggaacagattaagctgcagcaacagcttccgtgggctttgcctcgggttctgctggtttcgcctcagtttccgcaggcttcacctcggtttcggctggcttcacctcggtttcggccagagcttctgcttcccaaaaggcagtcttctttccggtctttgacactgtctgcagcacagcatcaggctggacgttgcccttcacagtcactttctgttgctccaaatctacttcatatgattccacaccttccattttccccagaactctcttcacggctccaacacatccttggcatgacatgccaaccttgagcacaac

SEQ ID NO: 17110 - DNA, 411 bp, Gossypium hirsutum
  Clone ID: LIB3829-028-Q6-N6-C10
gataaaaatcaaagggattcaatttcatacgcatagggagattaagaccatttcatcttaaccatgtctcatattttttttccgcttaaaaaagctaacattttttaaaaaagaaaaagagatccaataatcgatcatcatcattcatcaccggcatcgcgatcaaagacataaagcagtacactggagatcttccatcttcatccaagggtggaaaattgagatcgaaaggcaaagttttccgacaagaagacaacgcgatatccccatcatcaaccaccgacgatgatgaatcacagtcactatgacaatcctctggctctactggcggcggcctcggatagtacttcctagtcgaaaccaccgcgaagtccgccgacttttgcggtggttgggccggtctgggtccac

SEQ ID NO: 17111 - DNA, 537 bp, Gossypium hirsutum
  Clone ID: LIB3829-028-Q6-N6-C11
agaagtccagaaaaaaacaaaagatttattgctgggattttaatttacaacagagttccacatgtagtggtttgatcagttacaatgacaatccatgagcctcacaaatccatgcatgaattgcacctctcctatcctatctaatcacttatgaaaccttagaaaaaaaaaaacactagagacagatcagagtccaagcagtgatcaacatacctcaactgtcggtcttattcgagtttacaggcacgaatctgttggatcttcttctagctacctactgcacagagaaatttccttttgcttactggttcttcatgcaagactacaacatctctcaccttgtcaaacaactcctctagcttctccacactgagctttctatagtccaatgtcttcttataccgttgctgatatatttcttcgaaacaacccaagaaaatcctgcaggaataactcacaagaatttcctgcaactcgtatttgaattgctcaagattatcgtcagtcttcctctgatcccgttcgtcaactaccact

SEQ ID NO: 17112 - DNA, 539 bp, Gossypium hirsutum
  Clone ID: LIB3829-028-Q6-N6-C12
acaaacataaaagagtaatttgattgaattctagtgcagagaatcaaaagcccagatggaacattttgtactaactttttaagtacataaataaacctttagaatcctaggattaaacgaatataaagacaataaaattaaacatggaaggagggattgttcaaggaaatgaatttaatctggtttcttcaagttgagacaattatctgctgcttgactgaataactcctgaacctgtttcagttccttcacagcagcctccagttgtttctgaagttcttggcctacagcatcattttcagcttccattgtagtggtgaactccaactttgcacaacatggcataatactcgatctccgacttcctaagaggagggcagttgttggcaataataatcaacttacctttggagcttctgagagatttgacaacagttttgtaacccaaagtgtatttcccactttccataacgagagccaatctgttgttaatgctctcatgggtcttcttggtcttcttggctgcaaccattgtcgtc

SEQ ID NO: 17113 - DNA, 513 bp, Gossypium hirsutum
  Clone ID: LIB3829-028-Q6-N6-C2
gggaataaatttaggctttttattttctttccccgcaattaaagaaaaaaatcccccttcaaaagttattttacctacctactactaaattctaatatacaaagagggtctgtctataaatgagggcttcactcactcttcaccctacaatcacagagaatttggccccttctacccacaatcacatattatatttcatcctcctaaaccctcccttttgtttctccctataacagccacacccaccacaaaatctgaacaaaggggacactaacgcatccccaattttacttcccattctgtcggctggttcacaaagctaatatttagaacaaaatttgattttttttcttaaaagaaaagaaaaggtgaaaattttgacaaaaaacaggtaatgttctaaagaagcaacagtttggtggtgaggctaaaagcagaaagtccaaagctcagctcaaagcatcaaaaaggcctggtagacttggcttttgcatatataattcagtacaattt

SEQ ID NO: 17114 - DNA, 539 bp, Gossypium hirsutum
  Clone ID: LIB3829-028-Q6-N6-C3
aaaaaactaataaccttgtaatggcaatttaaacaaaagaaaagggacataaagagtaggcaaaagcagagtaatttatttacacaaaaatccctgcttgaatgggaggagctatatagtctcaaagcccaaaaccacattaatttgcttgaaaaagaaaaagaagctgatgcttttatctttcatctaatattacattatggcagctcttttgatgtttggacaaatccatcaactaaaaccaagcaaccagtaatggaaaattatctcaagaagagataatttaagatctagtgaatgttgcgatttagcaatccctgaaatgataggaacagatctttgttatctgtcccaaaaatctcttctgccttcctcaaagtttccgctctggtttgcttttgagcattcagttccttgatgttagccaaaaaagcctaaattgctcataggaaagtcgactcctggcctggcgaaagaattcctttccatcaattcgaggggtccttgctggcagtgagcccctacgaggaggagagtta

SEQ ID NO: 17115 - DNA, 411 bp, Gossypium hirsutum
  Clone ID: LIB3829-028-Q6-N6-C4
ggtgcaacaaagtttaatatttaaagaagcaacaagaaccagatgcgtgacaaagtcatcacatatatatacagatccattattcagatttatgaataaaagataaaaagacagcaagcaacatggaaagtggcaaatacaacagcaaaatgctaggctagcctctcaacattctgtcaagcacgatggtgtctactacttctgcgtcctctgtgatttgcagcgctgaaacagcctgtgctgctataagaccagctgaaagttcttcatttccccagcctctatcctcaaaccatggtgcatgtagatcccttctgcaagctccatacgtgaaggaccagtcactgcttccaaactcagcccactcgcatccaccactatatgcattagcgacccacccttgagaggttg

SEQ ID NO: 17116 - DNA, 537 bp, Gossypium hirsutum
  Clone ID: LIB3829-028-Q6-N6-C5
gacttcgaaaatatagcccctgtaaaagcaatatattgtttagcggtatacacaccaaacctagaaagatgtttctcaacaaccttcacagtagttgccactggcaaagtctacgtgatgcctaaaaaatctacagtacagttccaaggttttttgaatccatgatctcatccaaatgcctgctgctcatatgatcttagaaagaccctgtttaatcaggcactcactccttttttaattttgacggtccataacattgggaacttggtgaagatcgaaatacataagacaacaagatgattctgtctccggtaaaatcattagtcagcatccatttcttccaatgcagtcctagctgcaaccttggcttcctctaaaaggtcatcaggaaccttttgatgttgttgctttgactcatcacagacccaactcatttccagttcaaaggccttgtccttcgcttcatcatgtactttgtagatgattttggctacttcaataaccccttccctgcaggtcatttctgacagcttcaac

SEQ ID NO: 17117 - DNA, 538 bp, Gossypium hirsutum
  Clone ID: LIB3829-028-Q6-N6-C6
gcatcaaaattgtcacttttattataattaatcattatttaatttcatacaagttcaaaaggacaatgaaacaacaagaacaacctgccagacagcatataaacataccacaaattatgaaaactaaaacccctactacaaaataccaattcaagaaactaaccattgctccggctccagctccagctcctcatcttccttgaagtaccaatgctcaacatttccaagtctttttttttttattagtataaacaattatgcatatatttatggctaattaccatgaacaacaagcacggcaccttattaacccattttcattacaatcagggcaccttcttaacctacattcatcttcttcaaacacttttttgcttccactacagtttggacatggcacaaacctagcatcaccacaaccttcacaaacaaccccaggatctctaacaggaaacccttttaaaagcttagccaattctccattttcattaagctgtttgatttcttcaaccccaccaacgtgttttccttgtatgaa

SEQ ID NO: 17118 - DNA, 542 bp, Gossypium hirsutum
  Clone ID: LIB3829-028-Q6-N6-C7
gatggaaatatcacattatagacttaaaattaattaagtgccaagttttgatgggaaaggggaggggcgatggtaagatccagattgaggtcgggtaaacaagtactgctgatagtctccgaagcagttgctggattaaagggttggcatgcagaactggagtcgttggatgcattggatttggttaatgtaggagatagaagcgaacgacgattgtttgggtcaattcccatcatcaaaagtttctttcttaagtgaatattccagtgattcttcacttcgttgtcggtcctacctggcaatcttcctgctattagtgaccacctatttccaaggagagcatggagtttgataataaggtcctcttcatcttcaccaaaattgcctcgtttaaggtcaggccgcaggtagtttacccatctcagtcgacaactttttccacaacgaagcagcccttcaccatgttttagaatgtaatccgtgagcttctggtcttctaattaagaccaagctcctttgttttgtgtctttcttttcacaac

SEQ ID NO: 17119 - DNA, 532 bp, Gossypium hirsutum
  Clone ID: LIB3829-028-Q6-N6-C8
aaaaataaaaaccaaaatataaattataaaccagaaataaaaattaaaattgttcacagtccataaatacaaacctaaatataaattgaagcccaaattataaaacccacatcacaaataagactaaggcctgatcctagccctaaatacaaattcctaacccaattgaaacccgacccagttactgagaacctaaaacagacccaattccagaggcccaaaggcagattggcccaggtagcctgggcaggtgatgtttctggaaactcagggttccctcgtgctgcagtgcccacgcctggcttcctccgtacgaccatctccgcgatagaacctgaatcctctcaatcgcgtcgtcggagggccttctccgtcgctgcaatcggatttgacaaaaggacggagagccttcttcctctgtttctttagttgccgaaggtctagccttcaaaagggcttcaaaaggagggctgaaaagctcattttccacaacagcggccactggccacgacggcagttgagggtatggatg

SEQ ID NO: 17120 - DNA, 542 bp, Gossypium hirsutum
  Clone ID: LIB3829-028-Q6-N6-C9
ataaaaatatttttattatttttaagttttaaaaaaattaattaaattacgagccaccacatctatattttcccaagtataatgggataaaatcagtggaagtcttataaaagataatagatagctttaccttaaaagtaccccccccaaaccaaaaagaatcaaacccaatcaccacctacaattctctatgttacaatgaaggcatgtttgtattatacgtgaatgattgattgatgagaattcaatcagccaagggaaaaactcctatgatttaatccaaaactgctcttttatttatttttttcatctctaatatcatgaatcatctctgaaattcgtttggcaagttggatatctggtatcccatcctttgggataacatggttccaagacatatccacggttaccaccattgaagttgtcagcagggacatgggtttcttgtgaagcaccccctgtatcagatgatgtgcatgagtcatcttggacttctctttctcctcgggagacatcgttcaaggtgttcccatgcacctgat

SEQ ID NO: 17121 - DNA, 549 bp, Gossypium hirsutum
  Clone ID: LIB3829-028-Q6-N6-D1
gcagacatgattggagctaattaccaggtcaataaagaaacataaacccatttgcacccatttatacgtgctggttcttttagcaccgatggccgtccagtggttgcaaagtaattcaatatcctagaggtgttagggttgcaaccaccgtgagcatttcagtgcaacaacatgcactctcactttacagcagccacttcaagcgttgctccttagaaagattaaaattgtatttctgtctaaatttggttcatggggatatggatccaattttaagaaagaaccgccacatatcacatttatatcaaatattgaaagcaatatatatatatataataatcattgaagaatttataagctagtagtggtagtagcagtaccaagattacccgcagttcctccgctacccccaccataatcaaccgcttgagtggcagccaccgccgacacattgacccctacagcgctagttgtgacagaaggcctttttcgcttctttttctcataaggtatccctctagctctagcctgtccttccctcacttccct

SEQ ID NO: 17122 - DNA, 549 bp, Gossypium hirsutum
  Clone ID: LIB3829-028-Q6-N6-D10
gaatcataaaaatgcctgcagattaagttgttccatttcatcaaattttaggattcttaaaatgacattaatacatgaaaactataacaccaccttctagcaggcaagccaaccaacaatgccactatcacaattactaaaaacagaagccatgcatgctaatccaaaaactaaaaccgtcctcatataatttacaaaccagggctaaatctctaagagttcctttagttcatgggggagaaatgcaaaggcaattcagggtatcgatttcggtagctgatagcatcatttcttcttaatccgctattcttcaaatcatattttaccgacgtttgccaccgctctttctccccaaaaaattggaatactatttgatggtaatatggagttgcaacctatagctctatccactagtcttttgcggatatgatctcgatagttgtaccttatgggaggattgtcccccggaatgctaatgacttcgaatccaagtttaaggaaccacgaaagtgatatgaaccaaaaattaagatgtcagctcagcttaac

SEQ ID NO: 17123 - DNA, 475 bp, Gossypium hirsutum
  Clone ID: LIB3829-028-Q6-N6-D11
gaacaaaaaaaggcattctccaattgtataaatattgataatggaataaaccaacaagggaagggcctttggaatttcaaggcaatcatatatctctccggtaaaacaaaaaaccagatccagtaaatagtcaaaatcaaataaccaaaacttcaaacaactcaactgaacttgaaatgctacccctaagctccaatgttttgagacttgttaaggatgacaccttcatatttgacctggaaccatttcatggcatcctcctttgttactctgggctgaataccaacacgtgacttgcacctgcaacaacaaccaacgcggtacccagctcgttccaggacaacgtaaaagtccataccgtaaataccagttgaagggtcgtacttgatgccaaaatcaatgggctcctggatgccaaatccgaagcatccagtatcactgaagtttctcctcaaaagttcatactccttaacct

SEQ ID NO: 17124 - DNA, 55 bp, Gossypium hirsutum
  Clone ID: LIB3829-028-Q6-N6-D12
aaaaaagaggggggggggaaaaaggagggaaaaaaaagggaagaaaaaggggaaa

SEQ ID NO: 17125 - DNA, 525 bp, Gossypium hirsutum
  Clone ID: LIB3829-028-Q6-N6-D2
cacccaaaggcacacattaaaaattccaaatccaaaaagttaaaaatgaacagtgaaaaaccaagttcagtcacaactataaccccataacagtgacagtttttttcaagttccaaaacagtactgaatcaataaaaaagaacccagctatcatccttctaaccaatcaaactcattttcagcacattaaaggccaacactactaccaactcatgaaacaaggttgtcatttaaagacaatgaagccagttgatcagcagttccaccagcttgctgctgttgctgtgctacagtcctcaaaacctccattgcttctgcaactttggcttttaaagcttctggtgactcgagcaagtgtaaaacctccgtctggtccatctccagaagcatccctgttactttggctgctgcatcgggttccagctgctcaacgagtggatagagattctcccccagcatcgttctttgctgttctggagtagcatttgcaagtgctgaggccaaagctccaattggaattggttg

SEQ ID NO: 17126 - DNA, 527 bp, Gossypium hirsutum
  Clone ID: LIB3829-028-Q6-N6-D3
gtctgtccgcccatttactctaccatttaactataaataaatcatattaatttaacacaaggataggtttcttttacggcataacaaacagcttcaaagtgaaaggaacatgctttttgttaccaaataattatattaatgaaaactcattaataccatgtacaactttcaaaactaatgaatagtgatcatgaaaagcaaatagagcctggccattacaagtcagtagtcaccattgaagctaaatccaagtcttcatcagaatcaatcacctcctcaaagtcatagtatggattcaccttgggtcttggggtaattgcttcaaaactatggaattcaggattatcaaaaccagggggctttagtacaacatatgctcccttgttattggatctctcttctgttgcctgaaattgtgggtagtctggagcactaaatacagttatcagtttccccgactccacatcatgatctattgtgtatccttcatccattcccccgagaccaggccttttttctcttgcatc

SEQ ID NO: 17127 - DNA, 550 bp, Gossypium hirsutum
  Clone ID: LIB3829-028-Q6-N6-D4
aatcgaaaactgtaacaaaacatataacatttttcatctcttttagaaacttgttctacatccttggaacacgctcatgagttaaataattaaacacacctaaaagagaaagaaaaagaaagaaaagaaacaacctgatgcactacgaaagaagaaccgatggacaacacttttagcttatataaaaaaaaaggtgagattaaacgaaaggtaaagggttattttaaggatatgcaccattagttgttggaagatcagaccacgatgatgaaaatgccggattccagtaacccaattctcccccagcaactggagctgactccaaaatggatgttgatgaagaagaagcgacattgcttagaattactgctgaagtatcagagtaataacttgatgatgatttgagcctttgatacagttcttgaatacctgtgttttgaacttcacctacaaggaacccattattattctgttgttgttgagcgtggtgttgattatttttccagaaagggttaacgagatccaagcctagggttcgagcatttagtgc

SEQ ID NO: 17128 - DNA, 516 bp, Gossypium hirsutum
  Clone ID: LIB3829-028-Q6-N6-D5
gcacatgaaaaaaagctttttttatcacagtcagataactcattcaaatgcatctgcagtctcatatgtctgtagctatgttcagctgttttcctcttaccggtagattccataataataggaagattaacagcaggggcatgttgttttacatctatagcctgcaaaagggatcaagctggatagctaaaagcaaatgacataaacctgagcatttcattttgacatcatctttctttaatgcaggttgattcccttaccttgtcttgggaggctatttttctgcaaaactttccccgtttattgattctttttgcatcatcttcttgctctcctaatttttgatagtaagggttggggaatcttgtagcacgaacaatactgtgcggatcaacaattgactcgacatcagggatatccatttccctggattcattattgagagataccatcctgtccctcccatggggatcttgctttacagaacttgaagtcacatttggtgcattaaccatt

SEQ ID NO: 17129 - DNA, 534 bp, Gossypium hirsutum
  Clone ID: LIB3829-028-Q6-N6-D6
tttttttttttttttttttttttttttttttttttttttttttttttttttttttttttttttttttttttttttcccgggaaaatcggccaaccggcgcgaaaatttttccccggtttcaaccaacccccaaaaaatttttcccgggaaatcttttcccaaaaaaggaaaacttttccccgaaatctttttagggaaaattttttacgggcaaaaaaacagcccctaaaattaagccctttaaaaaggacaaacttgggtaaaaaaaatcttttaaacacccccaaaaaagggttttttaattggagcccaaggaaaggaaaaccccccttttttggttacaaaaaccccaatcgggggcggttttaaaggggggggttacccaaaaccaaggaagcaggtttaaaactaaaaaaacccccggggaaacttttaaaaagcttcccattttggggggccattttagggttttaagctaaaaccctttaaaaataaccttttcttaaaaaaaaccaaagggggaaaccccttttt

SEQ ID NO: 17130 - DNA, 524 bp, Gossypium hirsutum
  Clone ID: LIB3829-028-Q6-N6-D7
aaaaaaaacccaaaaacaataaaatgttcacaggtccgaaaatacaaaatattaatcgagacccaattgaaaccccaaaataaagcctaaaattattggcctagaccctaactcaaaatcccattacacccaaagccctccaacttaatccttaacccagtttacaacagcccactgctaaaacaatcccaaatggccaaaaggggcccaacagtttgaaagtaccaaaaaccccaaaggtttttggaacatgctagcgtcgcagccagccaggggatcgggctcccacgagtggtttcccacgcacgacctccacgtaaccagggcctttttctccgtacagcacctcctgcatccatagaacctgcgagaagaacaaaataacacagcaaagcaataatagaaaaagaaaatttgtatttacatttttattatttttttcccttttcccttttctcttggttcggctataaaaaggccgattatatactgtaaatgggattaccaatgcaaattgaatacaa

SEQ ID NO: 17131 - DNA, 526 bp, Gossypium hirsutum
  Clone ID: LIB3829-028-Q6-N6-D8
ggactaagcaaatatcagatggcaatttaacactaacatgaaactcaagttgataagcaaatcaaaacttcaatgtctaatatttataacatttctagggaacaacagaacataacataaacttgaatattctaagtaaaagagaagaaaaaaaccgcttttagtattaaatccccactactactttcagtccgtacataacagaaggtaaaacataaactcaaaagatcctgtttgaaggacccatggtgctcttcaagtagaggcacctcacattttgccaatttttcttcaacaaagaaacaaggaaattgacgctcatttgcacattttggaagatctgcttctcctccattgcaacattcccaacagcaactcccatgcatagaacctttttcagctggaacttaaccattgcctttgtttcattcaccttcgactctagggattcctggtgagtgacaagggttgggaatttacctgctttgttgagaccaggacccaaaagacgagggatttgcttgat

SEQ ID NO: 17132 - DNA, 523 bp, Gossypium hirsutum
  Clone ID: LIB3829-028-Q6-N6-E1
gaggtagaattttctataaaattcattcacttcaattctggttcttcaccactactctgtcaacttcacaattcacacttcaacatctatacaaattacagggatcatcaaaatgctacaatattctattccactgttcattctttgcttagccttctcacgctcttcaggtacatcatcaatccagtaaggaaaactatacagcattctagcaaattaaaagtaacgcttcacgggtacgtccgaggagactcaatgtggttgcagcaatgtgatgtccagtcagcccagcaagagcaagctgttctttcggtgatgcatgctcgatatagttgtctggcaagacaattggtcgccacttgagtcttccatcgagctgtccgtcaagcgcaatgaactgcgcaacatgagaactaaatcctccaacggaaccttcctcaacggttatcagaatgtcatgattgctacaaagccacctgagaagcttgatatcgagaggcttgcagaaccttgcatcagcaac

SEQ ID NO: 17133 - DNA, 523 bp, Gossypium hirsutum
  unsure (1)..(523): unsure at all n locations; Clone ID: LIB3829-028-Q6-N6-E10
ggatagcatataactcgcaatactacatangaaaaacagggaaaacatcaataaccacactagaccattatagtttggtcataaacatttattcaccaggaaattgtctcatgatatcagattcaattctccacatgtcctgcaagtaccagcagcaatttttcatagtctccatgagtgtccttgacaatggcacgagtcagtgggacactgttccttcgctgatactcatctgctatgatctttagatccacctcagccctagtgcaaacaactcttgtaagagctccttcatccgttcctcgtctattgattgctaggcgaagaaccttctcaaaatacttttccggatagaccaagcacttcactgtggaccttagtagtgcaaggaactcatccttagggtcagccttcaagtccttgtttatgtcatttccatattcatttttgtagtgattcagagttgcattgatctgtgccttgcttcttgtagccaaaacccttatgacatcgtcatcactgt

SEQ ID NO: 17134 - DNA, 500 bp, Gossypium hirsutum
  Clone ID: LIB3829-028-Q6-N6-E11
aggaataataatagaaatctgctcaaatttctccctaattttatctttactttacatcgaagggactaaattgcaaatctcttacaaacttttttcacaacggagcagaaagcatttttcccatctcaacattttaaaactcaaccctcgcccactattcccctaatattacatatcaacccccttgatttttcttttttccttaaagaaaccccacttgtttaacgcataaactgataagcagggaatattatctaatcgcccctaaaattttccagattttcaaatccgtccaccgtcttcaaaaaatatcacggagggcatcggatcttgaaaattccggagatatctaaatagagacgaaacgtatcaagagagagatggagataaaaagagacgcaggcttatttggatccaaatctaaatattcgggtatcagagatcaagccgtagcaaacgcctgagatcccttgtagctgaatcatcgaccggaacctgtt

SEQ ID NO: 17135 - DNA, 531 bp, Gossypium hirsutum
  Clone ID: LIB3829-028-Q6-N6-E12
aataataaagtcaagttggttttttaatataattttcagggagtagtagttgcttcactggagaatctggaatgttaattcacttgtactgtcatctacttctctataaggtttgtttcttgactaatccttaatctcatttctcctatcaatgtctggttattaaaagataaaaacacgttgggagagagtaatgtccataccattcaaccacttgattctatgactcaaaacaaacttcaaacccaactttaaacatgatgccttttcctgaacttgataatttgatgcaaggatctcaagaaggtggagcccaggcatccactggatcacttggcctcctgtatctcatgaccaccacttccagaatgccatcaggacggaacttgggagaaaacaatcgcggatcaactggtccaggcagattaaatgaaatggtgaatggcccaggagagcataacttctcaactgtcatctggcacacactcgataatccctgcagcacttcactgccttgtgttactataccct

SEQ ID NO: 17136 - DNA, 554 bp, Gossypium hirsutum
  Clone ID: LIB3829-028-Q6-N6-E2
aatgtaaaacaagattttatttcaaacggaatccgtcttctaatcatacaaacagcagagaaccattgaaaagaaaattcatgaatgagatcgaaagaacaacttgacaaatgtttcatactgctccagcggcaagaattggagacgaaacaaccaagtgaagcctactagcaatgacccaagtctcggaactttgcactctattctgcccgggattgaccagcccgggaagagaggatgataccgacaatgagtccatagagagccaaagcctcagcaaaaatgagaataagaatcattccaacaaaaagctttggttgttgggcattggctctaactccagcatcgccaacgattccaatagccataccggcagagagaccggcgaggccacaagcgagaccagaggaaagatgagcatagccatcgaaaaggtagtaagatttggcctttgggttaatcccagtgctgataataaccgcaataatcaacccataaatacctaaaactccggccataacaacgggcacgatcgatttcatcaccaactccgg

SEQ ID NO: 17137 - DNA, 524 bp, Gossypium hirsutum
  Clone ID: LIB3829-028-Q6-N6-E3
actcctagaaaaactcctagactagctgtaaatttcatatgtactccatccacttaaatacaaactcaccagtctttctatctctttagcagttgtggacaaaaacaaatacctcattcattattacacaacttacttttaacatgttaatagatattcacgggccagtttctatttccttatcatttcccagtccaatgatgtttttaaccaaaacagggaatatcatggagtgttcttcaaacttacaagaaaagatgatagctgttgtgatcgcctctttcatcctccatccaagtgctcattcagaacaaatggcctctgtaagatccctccgtaaataacccagctacaaaaacttttaccctttgatgtaaatgtcacatgaaatgtatgcatgcaggaagggaacatacctaggcaacattttgacttgatttgtgccaaatatcttatcatatataataaagatggggcaggcatctattgccctcggcaacaaatggaaccaccaacactcctgg

SEQ ID NO: 17138 - DNA, 529 bp, Gossypium hirsutum
  Clone ID: LIB3829-028-Q6-N6-E4
gatacgaaatcaccaaacttttattccaaacagaaggtttacttagattaacatgttacattaagagataagaaaataggcactttcctaaaggcttatttgtgaccatcttaagctagaacaaagacagaagaagaattaacttctcactgcccaccacggagacgaagaacaaggtgaagggtggactctttctgaatgttataatcagctaaagtcctcccatcctccaattgcttgccagcaaagatgagcctttgctgatctggggggataccttccttgtcctgaatctttgccttcacattgtcaattgtatccgaactttccacctccaatgtgattgttttcccagtcaatgtcttaacgaaaatctgcatgcctccacgaagcctcaaaacaaggtgaagggtcgattccttctggatgttataatcagccaaggtcctcccatcctcaagctgcttccctgcaaagatcaaacgttgttggtctggcgggatcccttccttgtcctgaatcttcgcct

SEQ ID NO: 17139 - DNA, 546 bp, Gossypium hirsutum; identical to SEQ ID NO: 16861
  Clone ID: LIB3829-028-Q6-N6-E5

SEQ ID NO: 17140 - DNA, 542 bp, Gossypium hirsutum
  Clone ID: LIB3829-028-Q6-N6-E6
acaaaacattctttgcttcataattgcattacaagccaactccaccagcttttctgatatagaaaaacgccagcataatttcgttacacagaaaattcttaataaagcctatataaaaaacaaggtgaccgaaaatcctaaatctcaaaaacactgacaatttaacataatgacaaagttatataggttgctgcatggtcacagttaagggactagtgacttcatgcttcccatcactccatactattgaaccagttttcatgctagtgccaccaggggagagcttcactgccatggtttgaacccttacaaggaagttgagtttttggccaactcttctaaatacaagctgttctggtttgaccgtaaccaccgtgccgctcggtggttgaattgtaactttatagatcgaattcgggtcaccgacgttagtgactcgtctgatgaaatgtgtagacatgttacgcctgccatactgttggaaaacggcggagagcgaagggtaattcaggttcccgacatggccggctcgttttgcgccg

SEQ ID NO: 17141 - DNA, 531 bp, Gossypium hirsutum
  Clone ID: LIB3829-028-Q6-N6-E7
ccaacaaaaataacacgggagaatcgatataatttctgaacacaagtacaaaattgctatcaaaattattgaaatatgttttagggtctcaacaaaccactgaagctctgccgcacgcatccagtctcagcacattatcatctaaacaagcatcttaatagggtgcaactggagcacggaagctagctccggcatagacagcttccgcaccaagctcctcctcaattcgcagaagctgattgtacttggctaaacgctcagacctgcatggagctccggtcttaatttggcccgtggccaaaccgactgaaagatcagcaataaaagtatcctccgtttcaccactgcggtggctggccatcacaccccatccagcttgcttggacattttcacagcttcaatactttcagtaacagatccaatttgattgaccttgagaagaagggcattgcaagttttttcagcaatagccttcgcaaccctctttgggttggtgaccaaaagacatctcctacaatctgaactttttc

SEQ ID NO: 17142 - DNA, 502 bp, Gossypium hirsutum
  Clone ID: LIB3829-028-Q6-N6-E8
agacaacaaatgagtgtatggtaggagctggtatttacattgaaaagatatgaaataacatcatcagttcgccccaaaatgtgattctacccagatccgcccctcatcactctaatcaatagaacattttaatagcatccaaaagatgaataaaaacagggctgccaagacaaaacaaggcattgtaataagcaaccaaaacaactgttgaaaatgctccctatctcttgtaacacgtgcagtaacaaggaaaaatcaaccgacttggattacttctcatgtgccaacgttgggagctggagttgatataggagcaccatgtgaatatctccattggtcacatgctgagcatttatccagtttcacactgttttccaaggtgcaaaacttacaggaccaaaatttgtacttggtgccaatgtctctgggcctttccgtgcagcaaagcttgcatattggggctaatggtggattcaataaagtgcatgattggcactcccac

SEQ ID NO: 17143 - DNA, 537 bp, Gossypium hirsutum
  Clone ID: LIB3829-028-Q6-N6-E9
atatatggatgggagactacacaagattcaatcatgaatcgtagcaacggctcacatcacatcacaactagtaaattttccataagcgaatattagaaattagagacatacatcacaataatgaggtctgatagtatgtttactttgttagaaactcgaatccactctacacactaaacaacatgtaagccatataaaactcaatctatgtacttaggtttcttgaaaccacctcacttcccactttaccttcacaaaatgttagcccacagctatttaccgcaagaagttgacatcaacatgctcaaactttcttcttctccatttctcattgaatttattcacctctaccgttttcgcttcgactttaaagaggtgacagattgagagttgctatgccagttacgcttcctctggttgatgaaccagttgttgatttgctttagctgcaatcctgtttcctccacaagtttggccttatcatcttcagttgggtatggccactttgagtgttgttgccaccagttctttagcacc

SEQ ID NO: 17144 - DNA, 531 bp, Gossypium hirsutum
  Clone ID: LIB3829-028-Q6-N6-F1
atctaagccattcaactttaaatcaaaagtacatatagaagcagattatcccatctacaactattaatttcagaaggtcaaaaggaaccaacaggattcagaggtacatttctcccttagatggcatgcgcatctaaaagaataacatggaaacatcgaaagcattaacatatggttttgatcaaacactatcacagcctacattgattatgctatccaccacggaccttcctactcatcatcttcttcgtctccgctgccttcttcatcatcatcctcatcattcacctcagacactgatttgtcagactcaacatcttcgtctttaggaccctcagcctgtctcttattgtaggccttcatgttcttttcatactcgacctttcgcttttctgccttggctacataaggtgctttttcagcttcagacaagctcttccatttatctccaccagctttgccgacagcggcaacggatttgtttttagggtgatccttcttgtattgctcacggaactcctccatgaaaac

SEQ ID NO: 17145 - DNA, 557 bp, Gossypium hirsutum
  Clone ID: LIB3829-028-Q6-N6-F10
aagaataagatgatgttatcccaactcttgtcacaagctttgtcgaaagcttaataaaaccagaaatggtaaaattgaattttgtcaagtgtttccccaagagagaaagaaagttttgaaacattgaaggaatcctagctttaacttcaacaccaaaacattatgcacaaaatgggtctgaaatagaaactgcaacaacttaaaagagcacttcacaaagccatgaaaatgtgaaagtatcaaacactggatcactcaagcagccgatttctcagcttcttctgctgcctcttgctctctcaacttgatcaaagatggaggtggtttcacaacaatgcttttcttccattgccgatcgagctttcttgacaatcgcttgttgatgccctcttcgagctctctttcccgtttaacagtaagcatgcgagcaatccttttgcgcattcgcccaaactcgctagacttgaactcattacgaaccgatttctggagacgaagcatcaaaagctcaccttttaattcaaccacttcatcgttgatttcctcagtggttttgg

SEQ ID NO: 17146 - DNA, 542 bp, Gossypium hirsutum
  Clone ID: LIB3829-028-Q6-N6-F11
agataatatgtcgaggtctttcatcattcaaacacgcaccataaaagttcaacaagcaatgcactttacaaactaaaaagacatgctttgaaacagggactcgttcggactcatgactgatagaatcttaaagttcctcacaaacgctaggactaggaaggttttataacttaatgtagactaacaggtttatttgctacaaacaccgacaaatggttgtgcctacaatgggaatttctagttcttgcttatagcagtagccttacgcactggatacgacttttttcagtagaacaaaaacaggcttacatgatgatctcctacccactccagcatcatgtcatctctttcagaaataataatcttcggtgtgtgggaaaagatcatgtatgatggtagctagttccggttcctgcatttttccatggccctcggagcgagtccaatggcatcagagcttttcatgatcctcaaccttttgcaggtgtcagggaacatctcccatggaacattacccacaagcatccaggcaccatttttat

SEQ ID NO: 17147 - DNA, 510 bp, Gossypium hirsutum
  Clone ID: LIB3829-028-Q6-N6-F2
gaacaaaatatgaaaagataactaaagctggctttaaactcacctgacaatccaaaaacaaaaactaatgtctttaacaagtcaaataccaaaacatagtcctcaaagaaagcaaccttacttcttgtcttccttctcagcctcagcagctttcttcaatcgggcaccaatgtgtcgttcatttgtacgttccacacgaagcttgttataggccttgaatgacttcatctcctctgtgaccttcacaagctccacggaaggcttctcacgagaaataggcatgtatgatccctggacttgggttgcagttgcaagctcctcagcaattgaatcaccagccttaaacttgcgagctcgtcttgggaagacaacaagtttggccttgtaagttttaagcctctgaacattggcttgaagaccttcaagggacttgttcttacgacggtgatcgactgcaataccaatggtaggtgcaagtttctttgaaataccagcagccttaagctcttc

SEQ ID NO: 17148 - DNA, 445 bp, Gossypium hirsutum
  Clone ID: LIB3829-028-Q6-N6-F3
caaaatgggccccaaaaaacctggaattaggccccaaatcagttcaaacaaacggccccctttggaaaattaaggggtttaacaaaaattggggggtaaatggggcagcaaacaaacacataaggggctaacatggggtccctttttttccaaagcccccgcaccttgccccgccgggtaagaattcccatcggcctgggaaaggtctggccaaaagggcttcgaaacttttggcttttaatgggaacggggggcctaaaaatgggccatgccacggccatccatgcctcccatatggccaaagctggaaaagcccattccccccaaggaaatatccccaggaccattcttttgggtttaatggacccattggccccaacccacttaaataaaagggggggccttgccttcaccgggcaaaagttttttccaccacactttttgg

SEQ ID NO: 17149 - DNA, 553 bp, Gossypium hirsutum
  Clone ID: LIB3829-028-Q6-N6-F4
aaaagggaactaagctcttgcataaaacaagtaccaccatcttcaaataagtcccaatatgttcgtgcaaaacacaattacacaagtgccacagaaaataaaacgagagatcaggtccacacatcataaactaatctgcatcttccaaacatctgactcgcaaagcacccataaagggtgattttgtcatattacacaacatttttacaagagtgcatcaaacagtgtccgcatcactttcaaacattcgaaccacctctgccaccccctcggcgatttccttctggatgacactatctggcatgtcaaatgtcctcctcattgaaagtgatctcccttggggctgaggatccaccacatcaagcatcgcttccagttcgtctaccattgacttcttagcagctcgcaccattagatcagctccctcaatggcatcaacagtaaggagcagcacaatgattttctcagagaacctttggcgttcttctgcatcctgggctactcgacgacgataggagaagttattaaaatatgatctgatctctttcagctt

SEQ ID NO: 17150 - DNA, 547 bp, Gossypium hirsutum
  Clone ID: LIB3829-028-Q6-N6-F5
aacgtgatatcctaaacgtatgtgcagaaaaaaaattattattattatcattataaatacaaccaagaaaatgacgaaaataaacattgtcattgtagctttgcaggttggaatctcagtgggctctccacactccaatgatggttaagctttttacattcaaaattcgcctttcctcaccagccagccaccagggccaccctggattaatttttacctcaagagagtagttggccttatttgagtccccatgccacccccattgaaactgaccattgcctgctaaattttggaagtatggcccattttcctacataatttccgtatatacatgtgtaggaaaatcgtagacttttctctttttagctctcaccagcagtggctatctcgtaaatcgacggggaacacgaggtgtcggcaccaccacatcccgaccagccttaatcaactccagacgttcttttattgttttatcaaacaatcggttctcaggattttcagcatagcagacgtagtaacagctcacacatgcatggggcaatgccat

SEQ ID NO: 17151 - DNA, 403 bp, Gossypium hirsutum
  Clone ID: LIB3829-028-Q6-N6-F7
acccccccacaaaaaattttcccattaggccaaggggggggccccccccccggggggtttaaaaagggggcaaaggggaaaaaacagggggaaaaaaaaaaaaccgggggctaattttatgggggagggaaaaaaaaaccacccccggggttcaccctatacggaaaaattcccccccccctttaaaataaagttggattttttggccgggccccctaaaaatgggttcccccaagttgggggggaggggcccaaaaaaaaaaggagcccttggtttttaaacccggggctttaaaaccccgggagaatttgccccccaaccttggaagggggggaaaaaagggtggggggaaaaaaagggggggggggtattttcaccgggaagagaaaaaaaccccttttt

SEQ ID NO: 17152 - DNA, 546 bp, Gossypium hirsutum
  unsure (1)..(546): unsure at all n locations; Clone ID: LIB3829-028-Q6-N6-F8
aaacaaacggaatgaagcaatttatcacaacgatgattattttgcggcatgtttgaaagttcaaaatctattgatttacactcaaattcactcacaaacactgganaaacattgaattttcagaggcactcaacccgcgcacacatcctatcgacccggtttcagtttcaaagcaagttctattaatttacaccacaaagcatatgaatcttgaacctaatagtgccaacaactcctcaaatctcaataagatcacctcctccactctacttgagtcgccttggcatttctgtctctggatgacagtggtctgtcgcttttgctcccttccttccctgcatgaaccagtctctgcgtccttggtgactgtgagtggattttactattggctgaaattggcagggactggcgacgagcgaggttatgtttttcacctccatcctggctaaatcgaggagagccttgcagtctcagcttagccttggcagattcagttgctgccatgtagcttggcagtgcaggactgatttgaggcccattctcagt

SEQ ID NO: 17153 - DNA, 536 bp, Gossypium hirsutum
  Clone ID: LIB3829-028-Q6-N6-G1
aagcttaaaaatcttagtagtagattagaaaaagaaaaaggagggctaagcttgttagcttgttagcacacacataatcatcacctagaaaataaatagtccaaaatgaaaattttaaaataatttgtgtatagcatcatgagcaatcagcctttgaaccattttttttcttagcagagtgactgctcatgatgttataacgtttccatcatgaagctcttccatttgatcatctctacctaagtacttactttttttgttgcttttttttttccttttaagtgtgctttgctatagcctttcccaaaaaccctaataaagacggaggagcccaataatcggctccattgtcgcttccgacttgaagtgtacatgatatcggaaccaagcatagccctctactctttaggtttttctttggttcttcattagaatcctgaagatcagcaggactacctttcctcttcttcatgcatttttcattcaacagctgaccacgggtcttcaggaaatatacaatttctctccccttgaac

SEQ ID NO: 17154 - DNA, 545 bp, Gossypium hirsutum
  Clone ID: LIB3829-028-Q6-N6-G10
aatctaatgtgattctcatacaaaatggaaactaaaagaaaccaaaatatgaaacatgagtacatgttttttttttatgactaaggttcttccactgcccagtgccccatacaacatatttttacaatgtacccaaaagaaccccttttgccttagctggtctactagtgacgatggtgctcacactctacaggcttgatagggaacctagcagtatcagtacaatagtcatagaccaagtggtttgccctaacccacaccagttggtggctctggtgcaaacttaactccgacattgtcggctcgtcccaccagaacctcttctcagcactgctgctgcatttcttggcgatctcatctgctgtcacggaaaccgggcactcgcatgcgtcgatttcgaagcctttgtaggaggcaacaaatggtgcatggctccaatcagtcttgactaggccaccctgtgtggcccaatcatcagcattccagattgagctatatacacccatggcttgggtctttgggaaaaggaaatcctttgtgttcca

SEQ ID NO: 17155 - DNA, 429 bp, Gossypium hirsutum
  Clone ID: LIB3829-028-Q6-N6-G11
aaaaccaaaggggggtttttttaaaaaaaaaaaaaaccgggaaagggggggaaaaaaaaaaaatttttttgggggaaaaaaaaaaaaggcctttaagggaaaaaaaaaaaacctggttttttaaaaaaaaaacaaaatggggcccccttaaagggtaaaaaaaaaaccaaaaagtggggaaaaaggaaaataaaaaaaggggggggggggccctcaaaaaaggggaacaattttttaaaaaaaaacaaccctttaaaaattttaaaaacccccccccccctttttaaaaaaaaccttaattcaaccccggggggaaaaatttttccctttaaaaaaccccccgggagaagggggcctttgttttttccaaaaaaaaaaaaagaccctgtttttttaaagaaattcctttaaaaaaaaaaagggtttggc

SEQ ID NO: 17156 - DNA, 525 bp, Gossypium hirsutum
  Clone ID: LIB3829-028-Q6-N6-G12
cccggcctgtaaataaataaataaaaataaaaaataatagttttatacagtccatgtacaaatcccaaagacccgattacatttttagcccaaaaccctatacccgtttacatttatgacccaactcagtgtagcctaactggcccaaaaaaccactaaccctatacctgtttcacccttagcccaaaatacacagggcccaagtggcccaattcattaacaggagacagaaaggcctagggtttcagaaaccctaggcgccacaagcaccccaacagacgcgtccgtcgtctcgcagtgacccaccatcaatgtcgtgattccatgttccgtatcacgccaggattgacgcctgaatcaacgccggtgtgccgttgtcagttcccgtttactaccagaccctcattgatatctgcaaaatgaaaagaaccgcagcaaaaaagagaagcaaaatatggaaagaaatcaaagatttctttcccaaattgtaatgatttacacagggctataaaagcgcttctttgt

SEQ ID NO: 17157 - DNA, 495 bp, Gossypium hirsutum
  Clone ID: LIB3829-028-Q6-N6-G2
agacagaacaaaatcctgcttttattcaattggaacagggaaagataatttagcaatattgtttaaaacttcactgaaatgggattgggatgccttgcttcttgttaacaatggccattgccatgtaacggattcccatcccgatagggacttgttcctctgggccctcccaaagggggcttcaccgtcaccgactaaacgccagtatccagtccttaaagcttcagcttgttcatcagggcagttttgtagcaaagcttcaactcggaagtttattccaagggaaccaaggaactgagactgagtaatagggccatgaacagatacatcatttgaagcttcctcagcagagtgcttgattgatgcaaaatcgacatatgcactaagatcagcactcccagggttggcaagtatgttaacaaacttgtgcttccgaattgcctgcagactatctgacactactccgttcaggccataatcgataataagtgctcc

SEQ ID NO: 17158 - DNA, 520 bp, Gossypium hirsutum
  Clone ID: LIB3829-028-Q6-N6-G3
aaagtggaaagatgatataattattaatatcttcaatgcggaagttgctaaaaagatttgcagattccttttgcaacgtcagtaaatgaagacttccaagtgtggagaggagaaccatctggtaatttttcggttagaagcgcctacaaactattacaggagggtactcaaaatcctattaatttacaaaccgaaaataaagccttttacaaaaaactatggaatttacaaatcccctcgaaagtcaaaattacaatatgaggaatttcttggaattacattcctacttttgctaatctgaagattaaatgtatagttgctgatgcccggtgtccttgatgcaaccaagaagaggaggattgcaatcatatctttcgtggatgtcatgggtttttagtcgagggtcaaatgaacagtgccaacttttctgttgtgggctttgggtaatctggacaagcaggaacagatttatatatgaaaacagataaacaacaagcagggacatctcttttaaaatctc

SEQ ID NO: 17159 - DNA, 122 bp, Gossypium hirsutum
  Clone ID: LIB3829-028-Q6-N6-G4
accaaaacataggtaatatggcagtaaaaaaacacttactatagtacatattaatttctgttcttgtacacacattaaagcccataagaaaagtaatgtacctgacatattagagacagtac

SEQ ID NO: 17160 - DNA, 522 bp, Gossypium hirsutum
  Clone ID: LIB3829-028-Q6-N6-G5
caatctaaacaatgttacatagcatggagaggtgaagcgtctggaaaatattctgttcgtaggggttacaagctcataatacaagacctttcaaaccctactgctagataggtccaagatataaaaggtaatctttacaaaaaaaaaaggctattaaatgtgccaccaaaaatcaagattaaaatgtggcgtataacttgaaattttattcctactttcaacaacctacattacaagaaactgatgagcacggcgtgttaccttcgatgcgatgaaaaagcaaaaatagtcttacatgtgattcaagactgtagatttacaacagaggtctaggaaaatttaagcttcaaatagccacaaaatttggaaaatactacccacagagactggattgcttacatgtttgaacgttattcacaaagttaatgtcgattatttgggtgtgctttataggcaatttaaatgaaaagaaatcaatgggtgcatgaaatgggcagtcaaaatgagctatttactgtgaat

SEQ ID NO: 17161 - DNA, 530 bp, Gossypium hirsutum
  Clone ID: LIB3829-028-Q6-N6-G6
caaaaaaataagttttatttcttaaatataaaaagaaatagtatttgacaaaaaatatgtccttcaaatcttatcattcatcataagctttggaagcaaatgcagagacacaagaaatcaatccatcaaagatacaaggaagaacccacaacaaccatacatattatgttatgtcaatcttgatttgacaacataaacatcacccaagaaacatatacatatcgttattcactcaagcagcttcctcttcttcttcctctccttcctcatactcgtcgtcagcagttgcatcctggtattgctggtactctgcaactaaatcattcatgttgctctcagcttccgtaaactccatctcatccattccctcaccagtgtaccagtgcaagaaagctttcctcctgaacatagctgtaaactgctcactaaccctcctaaacatctcctgaatcgaagttgaatttccgatgaaagtagatgccattttcagacccttaggtgggatgtcacacacgctagacttcacattg

SEQ ID NO: 17162 - DNA, 536 bp, Gossypium hirsutum
  Clone ID: LIB3829-028-Q6-N6-G7
aacccagaaaaaaacagcacttatcatttaagagtactcgacaataactaacaacaacataacaaaagcaaaagcaccaaacaaaatgtaaaacaagctaacagatgcttcaaaagtaagataaatctactgatcttataaaaacatgttaggcttaatcaacttcctccatcttgctgccttcggcatcagcatcctccaatgggggcatatcagcatcaccttcaccttcacctgcatcctcatcaatgctcaagccgagtttcagcatcctgtggattctgttgccaaaggtgttaggctcatcaaggctgaagccagaggtgaggagagcagtctcgaagagaaggagaacaaggtccttcacagatttatcattcttctctgcatcggctctctttctcagctcttccatgatggggttctccgggttgatctccattgtcttcttgcttgacatgtaaccagccatgctgttatccctcaaagcctgggccttcatgattctctccatgtttgcagtccaaccatactcg

SEQ ID NO: 17163 - DNA, 529 bp, Gossypium hirsutum
  Clone ID: LIB3829-028-Q6-N6-G8
aattatccccctaactacaaacgaaagcatttcgtaacagaaatgtcatggattgaagtggctcgagagcatttatccatgttatttacttcaaatagatgagcttagagtattgtgtcgatcttttactgccaatacggtttgtaggacacgatatcatgtaggagaaaacatgaactacataactattagccagatgattgaactaagttctgctaaatttgtaacggatgttctgttatagaaaagagtaatatggctttcacttcattcttttgcggacctcgtaaaagtagcttaggatcaccactgcggcggcaacagcaacccccacggcaccctgtgccaatacagtgctgtccttcaccattaccttggagcgagctgaagtgggagtaaacccgagttccgaaagtttcttatgagattcggcataatctctgaagaatgcatcctcatccttggcatagagctctacatacttgcggaactcagggtcatctaacaaagccttatctgttggaagttt

SEQ ID NO: 17164 - DNA, 476 bp, Gossypium hirsutum
  Clone ID: LIB3829-028-Q6-N6-G9
gggcaccaaactcgggacaaattcaattcggccaaaatctgcgcgcaggccagccaggggggcccaaaaaaccaaatgcattcggccataaaaatccacactttaacagggaaaccctaccgcctaaatgaaggtgcaggttccatttcattatgcttacaaacccatttgaccatccctttattggccccgaagaaaataaaccgaaaaccttccagaacagcatttgcgccacccacccataagcagataagcttcttcaggctaatgcttggctccatggccatgaaaatggccatcatggccctcccaaggggggtggccacccaacactacgggaccatcctgcttagccctgtgcaggacccaaaaccacatgacaatgcacaatcccttggcggagggaacttgccaactttttggggggggcaaatttacacctttggaagttgggctccctccctgggcacctccca

SEQ ID NO: 17165 - DNA, 452 bp, Gossypium hirsutum
  Clone ID: LIB3829-028-Q6-N6-H1
ccacgattggtttctccaacaactgcatgttggggaaaatggctcaagccttgcagtctagctggcccaattcctccaaactgctccaaatcttgctgcggttggtgaggatgatgatgatgatgacgatgctgtttctccagcagattccttggtcttgatcccccaatccccaagaaagctacagtcattgtgtcagcactgaaacctgataaaccagctgttcttggggggctgctctgtacactcttaaaaaacgcattgttttgctctaaaatccctggggtggtataacttttccccatcaagggagagttgagactacccgtgctagcagctgcacccattagagctgctttctgtaacaatgcattggtagacatggaggctgacccacaaaaaagtggcctccgttttcttcaaataacgttgctgaattcccgttcagctgc

SEQ ID NO: 17166 - DNA, 552 bp, Gossypium hirsutum
  Clone ID: LIB3829-028-Q6-N6-H10
gagctgaactttctctgttctttttcatttcatttttctccccattcatgtttggctagagaggaaaaaaactggatattcggaaattttaaattataattttcttttttgttcacacaaaagaccagtttataaaagagaatgccaagcaatggacagtgtttgcatcagctgcaagtactttccaagcaacagcttgttcatacgagacgtggcggcccattgtcgacatgcaaactccggccagcaagtgagtgaatccctgctgcatcaacttggtgaaatcagagcacaatgccttccgtcccgactcatcgaatattttgtccagtgtgatgtctggtagatccactagagttgtctcaagcatgtctagaccggcctgatttgcgaagatgaaaaccggtacagacttcaacgaacaacacaatattgcatcctgatgttgccaaagattcttcaatactgagtcgccaccaagtgattcggatttcaacaactcttcccccaaatggaaactgtagctctggcagatccaatgagccaacgtaa

SEQ ID NO: 17167 - DNA, 538 bp, Gossypium hirsutum
  unsure (1)..(538): unsure at all n locations; Clone ID: LIB3829-028-Q6-N6-H11
ggggcaaaaaccggtcgacattgcttcactgcacaaagcagcgtgtcaaaattaactttttgactacctctaaaaanaacctcaaattccgcaacaatattacaattttcgacatccttaatcaaatacgttgtaaaggccaacattttagacaacagaaaaatcaaacttgaggtagtctgtctctctatctctctctgtaactaagacttagaagacatcttatatcaggggccttgatttaagtgatgtgaagtatagcacgtgttgaggctcaattcggtacagttgtcacaagtcagtgtttcgggagaatgacggcaaaggcatggcttcctgtgggcgaaagatgactagcacagcgaacatcccaagcattggtatgacaagaagccacttcagcagtttgtagtaatacatatggaatgtgagggagaagtcgtctgagaaatagagtccgtttttatcaaccatttccacaacaacagtccctgtagtcctcacccctaccgttggaagtttaatccgatattttccc

SEQ ID NO: 17168 - DNA, 414 bp, Gossypium hirsutum
  unsure (1)..(414): unsure at all n locations; Clone ID: LIB3829-028-Q6-N6-H2
gaaaattgaactagtttcccattcatcaattcaacaaaataggtcgtagtgaaaaaaggaaagaaattgtaggtgaaatactccagaacttggaatccctactttttttttttttttacagattacatgaaaggttctttttgattaatttatggagaacctaaagatttaaagaacagagatctaataaatacaaagtctgtcataagaaaggctaaaaaggggctcaatggagagattacaaanaggataaaaatggctgctgattaaggttgtttacagcttaagaattttcaagcgtacttaactggggaagtaatgtttttctcttttctgccngcaaggatcatggtaatctggggtcctctgctaaatgcttggttgtggagcaatcgggtttggatcttggtttcg

SEQ ID NO: 17169 - DNA, 553 bp, Gossypium hirsutum
  Clone ID: LIB3829-028-Q6-N6-H3
tcgcggttttgtccgccggaatcctgccttcatggcttctcacgcgcatctcgatgatgatgacgattttggcggtgactttcctgggagtcatagtgcaaggcattcaggtaataaaagaagttttggtgatcttgaggacgacgaggacgatatttttggatcaaaaaaggcaatactaaagtagaagaaactgcccccggtgtagcaacagggatgattttgtcacttcgtgagagccttcagaattgtaaggacacccttgcaacgtgccaaacggagcttgaagctgcaaaatcagagattcagaaatggcattctgcatttcagaatgagcccttcataccagctggaatagctcctgaacccaagttagtaatgaattatcttcaaactctgaaatcctctgaggagacactgaaggaacaactagaaaaagccaagaaaaaagaagctgcctttattgtaacatttgcaaagcgtgagcaggacattgctgagttgaagtcagcagttcgtgacttgaaagttcaactgaagccaccatcaatgc

SEQ ID NO: 17170 - DNA, 272 bp, Gossypium hirsutum
  Clone ID: LIB3829-028-Q6-N6-H4
aaaacaaaaaaaaaacaaaccaacttatattttaataaaaaaaaagggattaaaaaacaatgtttgaaaaacaaaaaaaaaaaaacctaggcatcaaaaaaaaaaaaaaacagggaatttttgtgggcacaagggtacaacctcaaaagccccgggaattttggggggggatgggccaaagaaaaacttttacattgggaaaagaaggaaaactttttttttggggggaccggggttttaaatcaaaaaaaaaaaaaactaaccgggcccgg

SEQ ID NO: 17171 - DNA, 529 bp, Gossypium hirsutum
  Clone ID: LIB3829-028-Q6-N6-H5
gtgtgaagatcacataaaatgtgacgatagacgaaaagacatgcaccccaaaacctttcgaatatacttgaaattaaaatggagcaaatcccaaatcaactacacaaaaagcaaagtcaatcctaatctgatatgtgccttcagtttccactcggtgtacaaactacaaatcctatctcttaaaagacgctgcaaataacacaaatgacattcttcttcaaccatgccattcttatatcagatccgccacattcattggcatttcgtcgatctgggtactataatactgctctatatctcgcagaatcttgatgtcatcactttttacaaagttaatggcaacaccctttcgtccaaagcgacctgaacgaccaatcctgtggatgtaaagctctcgattatttggaaggtcataatttatcaccagggacacctgttgaacatcgagccccctggcccaaacatctgttgtgataagaacacgggttgcaccatcacgaaactcagccataatcgcatctctttcctt

SEQ ID NO: 17172 - DNA, 552 bp, Gossypium hirsutum
  Clone ID: LIB3829-028-Q6-N6-H7
gaccaaatagctataattctcctttttttgacaccttgatgagagaacaagaagattttcaaagggaaatgttgtgaatgtgaatccctttagaggtcacacaactcagtcacaaagtgtacataaaatataaatagaatcgcatcaactaatatgaacattagggtagtaacataccagtcgctcatataaacttcggacataaagaaactgaaatctccagcgagaccataatcatcgtctcattccatgctgaagtaaaatggtacaacaagaactgaaacctcgctgcttaattgaagcctgctgagaacggaatatatcggaaacacaacatcaacgtctaaaagcatttccttctgattcataacggccttgtgaataatgcgccctacgacggacgctctcttctattgttgagcttccacccttctcagcaccataaatgcttctattggcagcatccaagaagtttttgccaacagatgtgctggacagtgtagcctcccgagcatcattttcctcggcctttttcaaccgcttccacctttg

SEQ ID NO: 17173 - DNA, 530 bp, Gossypium hirsutum
  Clone ID: LIB3829-028-Q6-N6-H8
gagcaactgcagttttactggtattatacaaagaaatcctcagattacaagacaatggagaacatgagatggataaggatgaatggattttgacatcatcccagagtacaatattatatccttatcctaaattctacatttcaattcctttcttcctcacttactgtacctatgacatctcatggtcgtttgacaatttcataccatataaactttatataatcttggctactatatctatattttagccatggtctagcactccaaatgaaattcgattctcctacttgccagggttgagacagagttaccctgaaatgctatccaaccatctaagtatttacttggcagaaccattcccaacaaggggactgttatctgcaacaatgtccttgacagggttctgctctccccatacggctgcatctagatatccaaactcaaagagcctatcaagaatttcatcatctgctggctccaatgcccaattgaaaagctctcttccactagccctattctcaggattgcag

SEQ ID NO: 17174 - DNA, 72 bp, Gossypium hirsutum
  unsure (1)..(72): unsure at all n locations; Clone ID: LIB3829-028-Q6-N6-H9
ggggggggggggngggggggnggggggncagggtgggggggggggtngggggggaagagagggagaggaggg

SEQ ID NO: 17175 - DNA, 694 bp, Gossypium hirsutum
  Clone ID: LIB3829-031-Q6-K6-F4-FPOLYA
tttcaggcaaaggatgttaagttctaacatcagaagcatcttgcatcaagtagaaacatctaatgctaagtacactcttattactatgaatcatttattagagaaatgagaaagtaacattagagaagaagcaggacttagtttttgttggcaatgaaaagaccccatctctgctccccaaatctggtcctatttagctttgccttccatcccccaacgatatcgtcgtagtcttcctgagaaaagtcggtgatgaaggtatccttgtccttctcaactttgtctaattcacgctgcagaacttgtatgaactgatcggttcgatcctctgcaatgacctgatcaaaaccagcatccttaagcatctggccataagcttttacatcatggagatcatagcctctctgcttgatgtactctgcaaattcgggcgatgaagctcctgcgcttttgcagtaatcacttataagaactttgccccctggcttcaaccatttgtagaaatatctaaatagtgcaggcttgtcttgaatgtgtagaatcgtgtcacggctgtagataacatcaaagctgttatctggataagtctttgtagtgcaatcagcaacttcaaattccacagagcaatcgagtgcattggctctttcaagagcaaaagatttcatatgtatggacagatcgatgcccacaacat

SEQ ID NO: 17176 - DNA, 500 bp, Gossypium hirsutum
  Clone ID: LIB3829-031-Q6-K6-F4-R2
aaagacattccgtggcgaagtttggatctaaatgcctggccaaaaggttctagatgttggctgtggcataggtggaggtgacttttatatggcaaaagaatttggagtctatgttgtgggcatcgatctgtccataaatatgatatcttttgctcttgaaagagccaatggactcgattgctctgtggaatttgaagttgctgattgcactacaaagacttatccagataacagctttgatgttatctacagccgtgacacgattctacacattcaagacaagcctgcactatttagatatttctacaaatggttgaagccagggggcaaagttcttataagtgattactgcaaaagcgcaggagcttcatcgcccgaatttgcagagtacatcaagcagagaggctatgatctgcatgatgtgaaagcttatggccagatgcttaaagatgctggatttgatcaggtcattgcaaaggatcggaccagtcaggtcatac

SEQ ID NO: 17177 - DNA, 539 bp, Gossypium hirsutum
  unsure (1)..(539): unsure at all n locations; Clone ID: LIB3829-031-Q6-K6-F4-F22g
ttataagtgattactgcaataccgcaggagcttcatcgcccgaatttgcggagtacatcaagcagagaggctatgatctccatgatgtaaaagcttatggccagatgcttaaggatgctggttttgatcaggtcattgcagaggatttaaccgatcagttcatacatgttgtggggcgtgaattagacaaagttgagaaggacaaggataccttcatcaccgacttttctcaggaagactacgacgatatcgttgggggatggaaggcaaagctgattaggaccagatttggggagcagagatggggtcttttcattgccaacaaaaactaagtcctgcttcttctctaatgttactttctcatttctctaataaatgattcatagtaataagagtgtncttagcattagatgtttctacttgatgcttgttgcttctgatgttctgaacttaaacatccttttgccttgaataaattacccctttttcgtcagtttgtnnnntttcttccccttccccccttcccttccccggtcttc

SEQ ID NO: 17178 - DNA, 332 bp, Gossypium hirsutum
  unsure (1)..(332): unsure at all n locations; Clone ID: LIB3829-031-Q6-K6-F4-F23g
atcaccgacttttgttacgaagactacgacgatctcgttgggggatggaaggcaaagctgnttaggaccagatttggggagcagagatggggtcttttcattgccaacaaaaactaagtcctgcttcttctctaatgtttttttttcatttctctantnnatgattcgtacgcctgagagtgtncttagcattagatgtttctacttgctgcttgttgcttctgntgttatgaacttaaacatccttttgccttgncttaattacccctttttcgtcagttnnccncccccccccccccccnnncncccnnccccccccccaacccccncaa

SEQ ID NO: 17179 - DNA, 655 bp, Gossypium hirsutum
  unsure (1)..(655): unsure at all n locations; Clone ID: LIB3830-002-Q1-K6-A1
actaaaagcaaagnaaaaattaaaataaaagtcggtattggcttcgaagcagagccataaaatcacctgtattaagcaatctcttccttaaatccaaccattaaaaaccctcgtttcttaaacatcagatcggatccttgaaatctccatcgattcatttttggtacagttttcgtagtatcgatcaaacatgagtttcctctttgggaagagaaaaactcccgcagagcttctgcgggagaataagaggatgctggacaaatctattagagagatagagagggagaggcaaggtcttcagaaccaagagaagaaactgattgcagagataaagaaaactgcaaagcaagggcagatgggagctgtaaaggtgatggcgaaagaccttatccgaactcgacatcaaattgaaaagttctataagctgaaatcacagctccaaggcgtatctcttcgaattcaaacattgaaatcaacacaagcaatgggagaagcaatgaaaggtgtgacaaaggcaatgggccggatgaacaggcagatgaacttgccgtcgttgcagaaaattatgcaagaatttgagatgcagaacgagaagatggagatggttagtgaggtaatgggtgacgctattgatgatgctttgnaaggtgatgaa

SEQ ID NO: 17180 - DNA, 118 bp, Gossypium hirsutum
  unsure (1)..(118): unsure at all n locations; Clone ID: LIB3830-002-Q1-K6-A10
gattattcgagnagcagctgactttcttaaagagaagccaatgagcatcacgaggataagcgagcatcgagtcatggctcggatcaagcaaaagggagatggaagagacgtcattttt

SEQ ID NO: 17181 - DNA, 575 bp, Gossypium hirsutum
  Clone ID: LIB3830-002-Q1-K6-A11
ggcttttgccacttagagactcgaagaatgtgggtacgtgaaggacacaggtttcgtgtggctcaaacaaaagaagagcatcacccacaagttcgaaaagaagggaagctggtttcctatgcaactgaagtcacggctgtcgttgagaaaggcaagatcaagaagctgactggggtgaagaccaaagagcttttttttttatcacactgagtgatatccaagtggatgatcctcccactgggaagatcactttcaagaccccttcagggctgtttaggactttccctgtatcagcttttgagattgaaggtgaacaagttaagggttctaagggtaaggatgaagagaaacaagtgaatggagctgtggaagtgaaggaagtctagagtcctttttcaattcccaacagaagaaagccttaatgtactaaatatcattattagcaatcaataaaaaaaatgattttattttatggtactgcatagtttcagaaaatgtgttgtgttgttgcttcaatcagctggaatggtagtgtaaccaaatgcctttgtaagtgaaaaaaatgctccgtttcc

SEQ ID NO: 17182 - DNA, 623 bp, Gossypium hirsutum
  Clone ID: LIB3830-002-Q1-K6-A12
ctcatatctctcctttgtttccccttttctctctcttttttcaaccctaaccctacctcaccaaccaggattcaacatgaagggaggaaaatctaagtcagatactaagagtgccaagctatccgtgaaatccaaagctggaaagaaatcggggaaggctgccaaggatccaaacaagccaaagaggcctgctagtgccttcttcgttttcatggaggagttccgtgagcaatacaagaaggatcaccctaaaaacaaatccgttgccgctgtcggcaaagctggtggagataaatggaagagcttgtctgaagctgaaaaagcaccttatgtagccaaggcagaaaagcgaaaggtcgagtatgaaaagaacatgaaggcctacaataagagacaggctgagggtcctaaagacgaagatgttgagtctgacaaatcagtgtctgaggtgaatgatgaggatgatgatgaagaaggcagcggagacgaagaagatgatgagtaggaaggtccgtggtggatagcataatcaatgtaggctgtgatagtgtttgatcaaaaccatatgttaatgctttcgatgtttccatgttattcttttagatgcgcatgccatctaaggg

SEQ ID NO: 17183 - DNA, 620 bp, Gossypium hirsutum
  unsure (1)..(620): unsure at all n locations; Clone ID: LIB3830-002-Q1-K6-A2
cggacgcgtgggngaaccgcaccttcacctaaccatcaaaaagtaaaaaattgccaaacaaaagctatggcatttttaaggttgctgacccctgccactgccatagccgctgcctctgcctctgctctgcctgccgcctttgttttctcttcttcttcttcttcttcctcctcctcttctcgcaattcttctcatttccccaacgcaaaaagcctccctttcctctcttcaccacccaatcgcttaggccttataaggaacttcgcgacctctcccattgctcttaacatggattcaccctcatctaatcacaacccatctcaggaaaatgggtccttgcctgaccttcttactgagtatatggtggatatgaagtgtgaaggttgtgttactgcggtcaagaataagctacaaacagttgatggagtcaagagtgtggaagttgacttgagcaatcaagtggtgagagtacttggtaattcgcctgtgaaaactatgaatgaagcattggagcagactggtcgaaaagctagattaataggtcaaggagtgccagaagactttttagtttctgcagctgntgctgagttcaaaggcccacaaattttttgtgtggttcg

SEQ ID NO: 17184 - DNA, 598 bp, Gossypium hirsutum
  unsure (1)..(598): unsure at all n locations; Clone ID: LIB3830-002-Q1-K6-A3
ncgttattttcccccagcttcacttagcggatgattgaaggtgagggaaaaaactggcctcgtaaattggcctgggaaatgccggtccggatcgagtgacgtacatgataatgaaattgtggagggcgagctatgagcagtaatgttaaagatgtgcttggagcaggtcaagagatataaagaaaagccggttttttttttttttgcgaagacgtcacaatcccatgatgacaagttcattaaagacaacccccaccttcatttgcttagtgaaaagagcctgtttcttgacaatcaaactcagtgaaacacaacataccaaatgcttgcagctgcttctgaattgaaggaagtgtttgattgcttggatacttacgatccagattataagctagccccatcaatggaagactggaagttggctgagactttatgcagtttcttgaaacctctcttcgatgcagccagaatccttacaactacaactttccctaccgnaattacattcttttatgaagtgtggacaaacatgtggaacttggtcgttccatcactagtgaggatcctttcatcagcaaccttgcaaaatcaatgcacg

SEQ ID NO: 17185 - DNA, 610 bp, Gossypium hirsutum
  Clone ID: LIB3830-002-Q1-K6-A4
tgcatttgaaagcttgaggaactatggcttccaaccggacacgaagatctacaactcaatgatgatggcatatatcaatgctggtgaacctcgacagggtgagcaattactaagggagatggaaacaagagacatcaaaccctcagaagagatttacatggcattgcttcggtcttatgctcgtagaggtgatgctgttggagctggacgaattgcgaacagcatgcaatttgcaggatttcaacacaatttggagtattttgcattgctcgtggaggcatacgggcaagctggtgactgtgatcaagccaggagcaattttgacaacatgataaaactcggacataaaccggatgataagtgtaccgctaacatgattgctgcttatgagaagaaaaatttgttagataaggccttaaaccttctattggagctagagaaggacggttttgaacccggcatagaaacatataccgttcttgttgattggttgggtagattgcggctggttgacgaaaccgaaaagttactagacaagattgcggaactaggcgaagttcctcctttaaaggttcacgtaagcctctgtgatatgtactcgagggctaca

SEQ ID NO: 17186 - DNA, 114 bp, Gossypium hirsutum
  Clone ID: LIB3830-002-Q1-K6-A5
tcgaaaagcatacctgcccttgttgatctacttaaaccaattcccgaccgccctggtgcaccttttctgtccctttggcttctgattcagcttgcaaaagacagtccatcaaat

SEQ ID NO: 17187 - DNA, 658 bp, Gossypium hirsutum
  Clone ID: LIB3830-002-Q1-K6-A7
attttacaagaccattatccagagcgtctgggcttggcaatactatacaacccacctaagttctttgaaccattctggaaggtggtgaaaccatttctagaacccaagactcagaacaaagtaaaatttgtttactctgatgatcccaatagcaagaaaataatggatgagctttttgatatggagaagctggagtctgcatttggtggaaatgatgattcgggtttcaacattagtaagtatgctgagaggatgagagaggatgacaagaggatgcctgctttttggacaaggggaaatcctcaatccgcagagccacctgttgatttgaattcgcttgatttgaactcggattctgatacttctgacaatggcaaggtagacagttcccctagtcatgtttctgactctgaaaccctctctcccagtgaaagtgtcatcgtcacaaagggaagtgataatgattccacagaagttcattagatatagaagagactcgaaacctgaacctgtcttgggtgaggtaataaggtatactataatctgaccatatgcagcgggtgtcgattgtttcactgttttagttaaaaaatatgaagccaaaagtaaatctgctctcaatttttatcattgtcgttttatactaaagtttaaatga

SEQ ID NO: 17188 - DNA, 641 bp, Gossypium hirsutum
  unsure (1)..(641): unsure at all n locations; Clone ID: LIB3830-002-Q1-K6-A8
cccagagattatactaaaagttgatatgcactgtgaagcttgtgctagaaaagttgcaagaaccctcaaaggatttgaaggagtggaggatgttgcgactgatagcaaggcaaataaggtggtggtgaaaggaaagacggccaaccccgtcaaggttcacgaaaggctattaaagaaatacggtagaaaagtggatttattctctccgttgccggaaccaccgccgccggaagagaacaaggaagaaaacaaagaagctaaacccaaagaagaagaacagaaacaagagcctcctgcagtgataacggtagtattgaaggtcggcatgcattgtgaagcatgcgctcaagcattgcgtaagcgaataaggaagatccaaggcgtagagacagtggaaaccgatgtgggaaatgataaagtaaccgtaaaaggcaccgtagatcctacaaagctggttgattatgtttacaagagaaccggcaagcaagcgtccatagtgaaaggcgaagaaaagaaggaagaacaacaactacaagaagcagagaaaaaaccagcagaaagagccaacanagaaaccaaaccagaagaagaagacgacagaaagagtgatgatgtaataaagcgaagtgaatacttacaat

SEQ ID NO: 17189 - DNA, 608 bp, Gossypium hirsutum
  unsure (1)..(608): unsure at all n locations; Clone ID: LIB3830-002-Q1-K6-A9
caccagtgtatgaacctccaaaaaacctccatgtacgaacctaagccaccaaaaccaccggtttatacacctccaaagaaagagaaacctgaacccaaaccaccaatgtatgaacctccaaaaaaacctccaatgtatgaacctaagccaccgaagccaccggtttatacacctccaaagaaagaaaaaccagaacctatgccaccaatgtatcaacctcccaacaacccaccaatatatgagccaaaaccacctaagccaccagtttatgcaccaccaaaggaagaaaagccaaaacctaaaccaccagtttatgagcctccggcacatgagccaccatacggtcactatccaggacatccacctttggggaagcctcaatagaatgctcccatcgactagccattcccaacaattgagctactagaaaaattagtatttataataagaggaactgccggctgatgttctgttttattcttgtatggaatgtagtaatgttttctttcatgtttgaagagagaccagttgctcatggctgtactcattcgaatgcttattctatatcttcttctttctcaatgagcaatatcctgatgatttcannt

SEQ ID NO: 17190 - DNA, 540 bp, Gossypium hirsutum
  Clone ID: LIB3830-002-Q1-K6-B1
ggtggagtgatacctatgcatacacaccctagggcttctgaactcattcttgttatggatggcacactttttgctggtttcatatcctcagataacaaagtttactccaaatctctgaatgaaggagacattatgattttcccacaaggtttattacatttccaaatcaatacaggcaaaactcaatccgtggcatttgtatccttcaacagtgcagaccctggtgtccaaatcctggactttgccttgtttacaaatgacttgccgactgacattattgaaggaaccacttttctggatgctgctcagattaagaagctgaagggtgttcttggaggaactggttaatattatttgaacttgttgagagtccctttttttttcgtatgctttcacgtttgcttgtgtcttcttgtcagtggtagtttgttggaaattactagcaaaagagtgagtctctgttgtgtttctttgtgttccttcttcaggttctactgtgaaccaaaaatgtaataaaaaagaccatcgctttctcgaaaa

SEQ ID NO: 17191 - DNA, 600 bp, Gossypium hirsutum
  unsure (1)..(600): unsure at all n locations; Clone ID: LIB3830-002-Q1-K6-B11
atgactagtatcatggccattctggttcgacaggattcgcccctcctgatcaatgtgtacccttattttgcctatgcctcagaccccactcatatttccctcaactacgccttgttcacctcgaccgcaccggtggtggtcgaccaaggcttggaatactacaacctctttgacggcatggtcgatgctttcatttcctccctagataagatcggcttcggccaaattactctcattgtagccgaaactggatggccgaccgccggtaacgagccttacacgagtgtcgcgaacgctcaaacttataacaagaacttgttgaatcatgtgacgcagaaagggactccgaaaagacctgaatatataatgccgacgtttttcttcgagatgttcaacgagaacttgaagcaacccacagttgagcagaatttcggattcttcttccccaatatgaaccctgtttatccattttggtgaacttgaaatgttattgttggctatttaaatcttttgccagagacgcttcatatagtttctgcatattttgaaagtggaaaatcaatctaaatataaataagttntatttgttgttttttaatt

SEQ ID NO: 17192 - DNA, 655 bp, Gossypium hirsutum
  Clone ID: LIB3830-002-Q1-K6-B12
ccgtccgaaaacccataacgacaaaaggatcaagacctataatctatctgaaaacatatgcatataagtttgtgtggaattggtggtgggagaaggagagagtgaatatgattggtgaagcaaaagttgggaatgaagacttgaacttatgctttgagaagctgatgatggttgcagctgggaatagtgagggagttaagatgaatggtgtggggatcactgagtggaaagatatccctgtggagctgctgttgagaatcgtttcactactcgatgatcagactgctatcgttgcttccagtgtctgtagtgggtggagggatgccgtttgcttgggtctcacacaactctgtctctcatggtgtagaaagaacatgaacaatttggttctatctcttgcacctaaattcaccagactgcaaactctgatattgcgccaagagaatccacagctcgaggacaatgctgtcgagactatttcaaagttttgtcacgatctgcaggacctggacctcagtaaaagtttcaagcttagtgatcgctccttgtatgcattggctcacggttgtcctaaccttaaaaagcttaacatcagcggctgcacatcattcagcgacgaagctctcgcgtatttgactaatttttgtcgaaaact

SEQ ID NO: 17193 - DNA, 602 bp, Gossypium hirsutum
  unsure (1)..(602): unsure at all n locations; Clone ID: LIB3830-002-Q1-K6-B2
caagatgcaaattttcgtcaagaccctcaccggnaaaaaccatcacattggaggtggagagttctgatactattgacaatgtaaaggccaagattcaggacaaggaaggcatccccccagaccagcaaaggttgatcttcgctggtaagcaacttgaggatggccgcacgttggctgattacaacatccagaaggagtccacactccacttagtgcttcgcctccgtggaggaatgcaaatttttgttaagactttgactgggaagaccattacattggaggtagagagttcagataccattgataatgttaaggcaaaaattcaggacaaggagggaattcccccagaccaacagaggctgatttttgctggtaagcaactggaggatggccgtaccctggctgactataacatccagaaggagtccaccctccacttggtgctccgtcttcgtggtggtatgcagatttttgtgaagacacttactgggaagaccatcaccctggaagttgagagctctgacacaatcgataatgttaaggccaaaattcaagataaggaaggtatccctccagaccagcagaggctgatatttgctgga

SEQ ID NO: 17194 - DNA, 592 bp, Gossypium hirsutum
  Clone ID: LIB3830-002-Q1-K6-B3
tgagagttgagacccatcttcaaaatcaaactctaacactgaaactttgtcaggcggttctaattggaaccaaaaataatgtcttgtacctcagtttcttcttttactgcttctctctttgtcccttcaaaaagttcatctttttccaatcataagcgcagattcatccaatgttctcttggtggggctgtggtataaccataagctttagcagaacccctgttgctcaatgctgttcgagggcaagatgttgaaagaccaccagtttggcttatgaggcaagcagggaggtacatgaagagctatcaaataatatgtgaaaaatatccttcctttcgtgaaagatcggaaaatgttggtcttgtcgttgagatttccctgcagccatggaatgttttcaagccagatggggtcattttattctccgatattctcactcctctctcagggatgaacatacctttcgacattatcaagggtaaaggtccagttatctttgaccctatagccactgctgctgatgttgatcaagtgagagaatttagtcccgaggggtcagttccacatgttggtgaagcattgacaatcttga

SEQ ID NO: 17195 - DNA, 602 bp, Gossypium hirsutum
  Clone ID: LIB3830-002-Q1-K6-B4
cggacgcgtgggcggacgcgtgggtgtgtacccgaaaagaccggcattcaaagggtccgctccaatcaatctctcagatcggttgcaccaagttttgagatgggcacttggctctgtagaaattttccttagtcgtcactgtccactttggtatggttatggcggaaaactgaaatggctcgagaggcttgcttatatcaacaccattgtttaccctttcacctcgatccctttactcgcctattgtactattccagctgtttgtctcctcactggcaaattcatcatcccaactctaagcaaccttacaagtgtgtggttcttggcacttttcctctccatcattgcaactggagtgcttgaacttcgatggagcggggttagcatccaagactggtggcgcaatgaacaattctgggtgatcggaggtgtctccgcccatcttttcgccgtcttccaaggcctcctcaaagtcctagctggagtagacaccaacttcaccgtaacagcaaaagcagcagaggatacagaattcggtgaactttatctcttcaaatggacaactctcttaatccctcccacaactctgataatactgaaca

SEQ ID NO: 17196 - DNA, 339 bp, Gossypium hirsutum
  Clone ID: LIB3830-002-Q1-K6-B5
gtatcccaataacgtcttgtcttttcaatgcaccagcacagctcttaatagcagaacccttcaaatcccataaaatcttttagccttctgttacacatttccaaatgaccatttcatttcatcaatctggagcctgtggtcttctcctttccagtattctccaaacatgctcaggaactcttccatccaggtaatggccttcatttactttcaacgcttcctttgcaatcacatgagcaaagatgttttctgactttggaatatggtggaagtgtagtttttggagaaatgcttcatatcttgaattttctttatatagctctaatattgagttatctc

SEQ ID NO: 17197 - DNA, 109 bp, Gossypium hirsutum
  unsure (1)..(109): unsure at all n locations; Clone ID: LIB3830-002-Q1-K6-B7
aaaaagaatttgagacaaacgacggcggttagaaatctgaaaaaacagaatgccctgngcccagttctggcccctgggaacttggcaacaggctaactgaaaaactcga

SEQ ID NO: 17198 - DNA, 652 bp, Gossypium hirsutum
  unsure (1)..(652): unsure at all n locations; Clone ID: LIB3830-002-Q1-K6-B8
cctaaacccaaaataaggggtgaagcccgcaccgctagaagtctagatcgggtgaagatgaacaacactctcgaaactcctcgttccaccattaaaggtgttctgcaggttccaaaacaggcggagatgagtttcagtagggaaaatctaagaaaagttgaagatcaactcaagcgggctttcgttgaatttttttctttgcttcgcctgcttaaaagttacagctttttgaataccttggcattctccaaaatcatgaagaagtatgataagatcacatcgagaagtgcatcgagatcttacatgaaaatggtggataactccaaccttggtagctctgatgatattacaaagctgatggagagagttgaagctacattcatcaagcatttttccaatgccaatcgtactaaagggatgaatatcttaagacccaaagccaaaagagacaggcatagggtaactttttcaactggttttctggctggttgcatggcctctcttcttctagcccttataatgatcgttcggctccgtagaatcatggatagtagagggaggactatatatatggaaaccatgtttccnctttatagtttgttcggattcattgttctacacatgctgatgtatgcaattgacattttctact

SEQ ID NO: 17199 - DNA, 605 bp, Gossypium hirsutum
  Clone ID: LIB3830-002-Q1-K6-B9
gtcctgtaagatcttctaggagaagcataagtaggagctctgctagggctcctactaggagaagcatcagcagaagtccattaagggaaccaagtaggaattatcggcgtagttattcaaggagccccaccattgtgcggcgggtaaggtcacctcctggtcgaggtagaagcatgtcaacaagtgtttctcctgacgcatcacctaagcgtatcagaaggggtcggggtttcagtgagcgctactcttatgcacgaagatacagaaccccttctccagatcgttctcctgtgaggtcctatcgtttcagtggtaggattgatcgtgagaggtattcaagttacaggcggtattcacctaggcgctatagaagccccccaagaggaagaactcctccaaggtatagaggcagaagaagccggacaagaagtctgtctgtatcaccgagcccgaggtatagaaatcgtcgctatggtcatagccgcagtcgtagcccaagtcgtagtcgaacctctattcgcagccgtagcccaagtcgaagtcgaacccctattcgcagctgtagtccagttgattctccaaaggctggaaggcgaaggtcccct

SEQ ID NO: 17200 - DNA, 597 bp, Gossypium hirsutum
  Clone ID: LIB3830-002-Q1-K6-C1
cggacgcgtgggttttgacaatggcggacaagtattcccttcctccaaacccaccgccaccgctgcccctggcggagcagcagctcctactactactactactactacctccaccacaaccaacggcggaactaccaaatcccacctcattaaccccaccgcccgcctaccctaccgtccacagccccataacagacgtcgcaactaccgtccacggcgcaactactgttgctgctgctgtttctggatcatcctcatagtcctcgtgctcgcccttttagtagccataactggcaccgtcctttacgtcttttaccgccctcaccgcccttcattcaccctcgcttccctccgtatccaccgcttgaagctcaaaaccgccgccgactcctcctcttcccatctttcaacccttttcaacttaaccctttcttccaaaaaccccaactctcatctctccttctcgtacgacccattcgtcatttcatgtgtgaccagcaatggcgacgttctgatagggaacggaacgttgccggcattcgtcagtgacggcaaggacgagtcgactttcaggggggttacggtggcgtcgtcttc

SEQ ID NO: 17201 - DNA, 590 bp, Gossypium hirsutum
  Clone ID: LIB3830-002-Q1-K6-C10
gagcttggagacaatgatgatgatgaggatgatttggctgccttggaaagaaagatgcagagtgcggggatgccttcaaatatctggaagcatgcacagagggagttgaggaggcttaagaaaatgccaccgcaacaacctggatacaatagttcacgtgtctacttggagcttcttgctgatctgccttggcaaaaggccagtgaggaacaggaattggacctgaaggctgcgaaagaccgtctggactgtgaccattatggtttatccaaggtcaagcaacggataatcgaatatctggctgttcggaagcttaagccagatgcaaggggtccagttctgtgctttgttggcccaccaggtgttgggaaaacatcattagcatcatcgatcgccgctgctttgggaagaaaatttgtgcgcatatctttgggtggtgtcaaggatgaggctgatatccgagggcataggagaacatatattggaagtatgcctgggcgtcttattgatgggttaaagagagtagctgtttgcaacccagtcatgctattggacgagattgacaagaaggttctgatgtgcgtggtgat

SEQ ID NO: 17202 - DNA, 646 bp, Gossypium hirsutum
  Clone ID: LIB3830-002-Q1-K6-C11
gtttcctggctgaattatggcttctgcaagcctaggaatggtggagcaggtagttcaaggtctgtcaacggtttcaaaagttcttctagttctgttgattggctggggagagaaatgcttgaaatgagattgagagacaaagtggaccatgacgaagacagagacagtgaacctgatgtagttgatggagtggtttcttaaacagggcatgtgataagaacaaccattggtggtcgaaatggtcattcaaagcagaatgtcagttatattgctgagcatgtggttggaactggttcttttggtgttgttttccaagcaaaatgtcgtgaaactggagaaattattgccatcaagaaggttctacaagacaagcgttacaagaacagggagttacagattatgcaaatgctggaccatccaaatatagtgtcccttaagcattattttttctcaaaaacagacaaggaggaactctacctcaatcttgttcttgagtatgttcctgagactgttaatcgcacagcaagaagctacagccggatcaacacacgaatgcctttaatatatgttaaactctatacctatcagatttgcagagcacttgcctatatacacaactgcattggtatatgtcaccgtgatatta

SEQ ID NO: 17203 - DNA, 646 bp, Gossypium hirsutum
  Clone ID: LIB3830-002-Q1-K6-C12
agaagatcaacatgttgctaccactcaagcaaattgccctccttgaatgaagctgatgatgttcaaccaaatgccacaacaagagaagaggaaatcgatttagatgttaatcaagcaatatcaatagggacagatgttgtgcagtttaatgaaacaattgaagatattcaaatacaacatttatatgaatgcacacaaggagatccctcaaccagttctgaattacatgcagatgctgatcgtggctccaaggatgttgaggaagaaacaatgcagcagcttaaaactgcaacatttgagagtgagactagtgaccaaccaatgaaaaaccatctatcattatcttcagagcttaatgatattgaggaagataaagttccggatacaccgacttccatcgatagtctccatctgttgcacaagaaattgttattgcttgacagaaaagaatccggaaccgaagattccttggatggaagtgttttcagtgacattgagggtggtgatggggtactgactgttgacaagttgaaatcagcattaaaagctgaaaggaaagctttaaatgcattgtatagcgagcttgaggaagagaggagtgcttctgcggttgctgcaaatcagacaatgcaatgataaataggct

SEQ ID NO: 17204 - DNA, 593 bp, Gossypium hirsutum
  unsure (1)..(593): unsure at all n locations; Clone ID: LIB3830-002-Q1-K6-C2
gttgggtggaagtgcaatagatgatgattgggagttcacctctccttccaatggtattaagactgtggttttagttggacgtaccggcaatggngaaaagtgcaactggcaatagcattcttggaaaaaaaccttcaaatcaagggctagctcatctggggttactagtacttgtgaattgcagaaaacagtgctcattgatgggcaaattttaaatgtcattgatactcctgggttgtttgatttctcagctggatctgaattcattggaaaagaaattgtcaaatgtattgatcttgccaaggatggaatccattcagttcttgttgttttctcagttaggacccgcttttcgcaagaagaggaagctgcattgcgtagtttgcagactttatttggtagcaaaattgttaactacatgattttagtgtttactggtggggatgaactggaagaaaatgaggaaacattggaagattatttgggtcgcgagtgcccgcagccattaaaggacattctaggtctttgtggaaaccgacttgtactttttgacaaacagactaaggatgaaaccaagagagtgaaacaagttc

SEQ ID NO: 17205 - DNA, 661 bp, Gossypium hirsutum
  unsure (1)..(661): unsure at all n locations; Clone ID: LIB3830-002-Q1-K6-C3
caacacccaattccaaaacacacaccaaatccaacacccaaaataatggccctctgcaagccatattctaggctggtcctagcactggccatggcattggtggcagctacggtgcctgtttatgggcagagaactatcaacaatccatgcaccccatcagcacttaacatcttcactccttgtatgaacttgcttaccaatagcagtgccaatggtacttcgcccactgcagattgttgcaactcgcttaaaacgctcacatcgagcggcatggactgtttgtgcctcattgtcaccgggagtgtcccgttccgtttacctatcaatagaactctagctatttctcttccccgagcttgtagcatgtctggtgtccccctccaatgcagagccgctgttggtgcacctgttcctgctccaggtccaatttcacttgcaccaaccctttctccaggaacatcaccaactttaagcccaaaaggttccattgtgccagaaccaacaggacctgctgaagcaccggaatccaacaccatcccgaccgccacgacgggtagccgccctgttctgaaccccacagcatcagctgccgatcgttcctacggttnttcaccatcacttgtgttgttgacattanggtttgctgtttttcagtactact

SEQ ID NO: 17206 - DNA, 663 bp, Gossypium hirsutum
  Clone ID: LIB3830-002-Q1-K6-C4
caaaaaccgaaaaggttttttttcttctttttccaacattttattttccttcaatctaaacgaagaaaagagaaatgttcctttatctatcataggagtagctgcaagatctactgatccagctgaatctaatcgaggaattgttgaaatttttagaaattatgtccttttaaattttccttttctagattttggaagacaagggaatgggggacaaggaggaggaagaagagtggaccgggacggagagcggggatttgacatcggaagacgaaggaacggaagattaccggcggggcggttatcacgctgttagaatcggagacactttcaagaacggtcgttacgttgtacaaagcaagctcggttggggccatttctccaccgtttggctcgcttgggacactcaccgctcctgttatgtagctttgaaagtacaaaaaagtgcccagcattacactgaggcagcgatggatgagataacaatcttgcaacagattgcggatggggataaagaggataaaaaatgtgcggtgaagcttttggatcattttaagcattcaggtccgaatgggcagcatgtttgtattgtgtttgagtacttgggagataatcttttgactctcatcaagtattctgattatcgtggcatgcctattcata

SEQ ID NO: 17207 - DNA, 576 bp, Gossypium hirsutum
  Clone ID: LIB3830-002-Q1-K6-C5
ggggtgtggggggaatcaaagctagggttaggattgaattttgcagaaaaggcaatgaggaaagtttatagcgagataaaagggatgaaagtgaaggaagtccctaactacgtgaaaccgatgctatcaatggattacgtgaagaaagcttttcaaaagggtttggacaattacaattcaaagtacattcaaaccgattcgatccagcctctttaccatgtctgtttcggtgggatggtcttttcttacctcgtcgctctcccaaatgagcgtcgccatctcgagcaccagcaacacgccaaggaacatggtcatcactgatccctgctcaggttaaagagtggcatttatggcataatgcttctggttgtaatttctgagcaatttaggcaggaagatactgtctttgatcaaatgcattgcagcattgtggtgataaaataatattaaaaataaaatggatttttgttatggtggtgtgttgttgatttctattgactattttttgttgggtgttgataagttggggatcaatcgattaaatactgaattttttttatagtggaaattgactgc

SEQ ID NO: 17208 - DNA, 315 bp, Gossypium hirsutum
  unsure (1)..(315): unsure at all n locations; Clone ID: LIB3830-002-Q1-K6-C7
gcttcaaaatacgaaaagcacgaagagtctgaatacaaacagccaaaatatcatgaagagtacccaaaacatgagaagcctgaaatgtacaaggaggaaaaacaaaaaccgtgcaagcaacatgaagagtaccacgagtcacacaaatcgaaggagcacgaagagtaccagaaagaaaaacccgagttccccaaattgtttttttctaaagagcacgagnaacacaaagtcgaatatccgaaaatacccgagtacaaggaaaaccaagatgagggtaaggaacataaacatgaagagtaccacgaatcacgcgaa

SEQ ID NO: 17209 - DNA, 656 bp, Gossypium hirsutum
  Clone ID: LIB3830-002-Q1-K6-C8
tggaaactctggaaacagtttgagatagttctaaattttcttggactggttgagaagttcttctatctctcaggtagatatgacattgagcttgcagttggagatgctgttatggaaaactctttattactagctattgggcatattgagttagatctgccagaacctccagagaaggcaacccgccctccttcttatcctgttgatccttactcaagatatgggcccaaagcagaaataactcacatcttcagggctcctgaaaagcgtccccctaaggagctttctcttgctttcctgggtcttaccttcttgccattgcttggattcttgattgggctattactattgggagtgaatttgaagaactttccttccaatgctgtaccagccacgtttgccacacttttccacgtcagtattggagcagttctgtcgctctatgtgctcttctggttgaagttggatctattccaaacactgaaactacttggtttcttgggagttatccttgtgttggttggccatagagtcctttcccatttggcttctacatctgccaagcttaaatctgcctgagttgattgaagataattcctattcctttgcaagcgttgcttgcttcaagattgttttcctcttctcttttggttagc

SEQ ID NO: 17210 - DNA, 643 bp, Gossypium hirsutum
  Clone ID: LIB3830-002-Q1-K6-C9
gaactcgccatgaacacccattcaacttgttttggaggcaaggatcgttcatttgtgatgcatgtggttcagaggggaacaatctttgctatatatgttctatatgtcacctccaagttcataagaagtgcacctctttgccgcgcatcattaaaatctcacggcacaatcactttgttttccgcaagtatttgatatcatgaagcaaagattgaaaagcaagagtgtatgatttgtcatcatgatgtgaaaatggagtatgggtgttattgttgtttgaaggatgattgcaattactttgttcatgtgaattgtgctactgagaataccgatttgtactacattgttgattctgaaaatccagacgagttggttgaggaacctatagaatccgcaatcacttgtgtcattgaggtgaacgaactcggagatgctacgaagatagaacatgtcagtcatgaacattgcttagttcttggagtcatgacccaggacgatgttgataaacattgtgatggatgttctctctcgatcttgggttcattttactcttgtttgcaatgcatcttctttctccataagtcttgtgccgatatacctatgaaagaagcatcattgtttgacatacacttgctaaaccttg

SEQ ID NO: 17211 - DNA, 600 bp, Gossypium hirsutum
  Clone ID: LIB3830-002-Q1-K6-D1
gttaaccatggctcataacactcgtcaccctttcttccttttccaacttttactcattagtgtctcactaatgatcggtagccacaccgtctcgacagcggctcgacgtttattcgagacacaaacaacctcatcggagttgccacaattagcttcaaaatacgaaaagcaggaagagtctgaatatgaaaagccggtatacaaacagccaaagtatgacgaagagtacccaaaacatgagaagcctgaaattcacaaggaggaaaaacaaaaaccgtgcaagcaacatgaagagtaccacgagtcacacaaatcgaaggagcacgaagagtaccagaaagaaaaacccgagttccccaaattggaaaagcctaaagagcacgagaaacacaaagtcgaatatccgaaaatacccgagtacaaggaaaaccaagatgagggtaaggaacataaacatgaagagtaccacgaatcacgcgaatcgaaggagcacgaagagtacgagaaagaaaaacccgagttccccaaattggaaaagcctaaagagcacgagaaacacgaagtcgaatatcccgaaatacccgagtacaaggaaaagca

SEQ ID NO: 17212 - DNA, 603 bp, Gossypium hirsutum
  unsure (1)..(603): unsure at all n locations; Clone ID: LIB3830-002-Q1-K6-D10
ttttctttctatttgattaaccatggctcatagcattcgtcaccctttcttccttttccaacttttactcataagtgtctcactagtgaccggtagccacactgtttcggcagcggctcgacgtttattcgagacacaagcaacctcatcagagctcccacaattggcttcaaaatacgaaaagcacgaagagtcngtacatctaaaagccagaatacaaacagccaaagtatcacgaagagtactcaaacctcgagaagcctgaaatgcaaaaggaggaaaaacaaaaaccctgcaaacagcatgaagagtaccacgagtcacacgaatcaaaggagcaaaaagagtacgagaaagaaaatctcgagttccccaaatgggaaaagcctaaagagcacgagaaacacgaagtcgaatatccgaaaatacccgagtacaaggtaaaacaagatgagggcaaggaacataaacatgaagagtaccacgaatcacgcgaatcgaaagagcacgaagagtacgagaaagaaaaacccgagttccctaaattggaaaagcctaaagagcacgagaaacacgaagtcgaatatccggaaatacccgaat

SEQ ID NO: 17213 - DNA, 617 bp, Gossypium hirsutum
  unsure (1)..(617): unsure at all n locations; Clone ID: LIB3830-002-Q1-K6-D11
cgaccctacanagaagaaagataaaaggggttatttcctcgcataccaaacatacagatttgtttttccttgaaaatcgccgaggaaaatgcagcacctgaggctgaagcaacagcaacaagccctgatgcaacaagctctcctccaacaacagtctctctatcaccctggcatcttagctcctccacatatagagccaatcccaagtggaaatctgcctcctggttttgatccaagtacttgccgcagtgtgtatgtgggaaacatccattcacaagtgactgaaccactactccaagaggtttttgcaagtactggtcctgttgaaggttgcaagcttatcagaaaggaaaagtcatcatacggattcgtccactactttgatcgtcgatcagctgctctcgctatattgtctctaaatggaaggcatctatttggacagcctatcaaggtcaattgggcatatgctagtggtcagagagaggatacatcaggccattttaacatttttgttggggatctcagtcctgaggttactgatgcaatgctgtatgcatgcttttctgtctatcacagttgttcngatgcgaaggttatgtgggatcagaaaactgggc

SEQ ID NO: 17214 - DNA, 566 bp, Gossypium hirsutum
  unsure (1)..(566): unsure at all n locations; Clone ID: LIB3830-002-Q1-K6-D12
gcctattcgcatgcatgccactgaaggtgattcaaagccacatcatgagcttgtagtcgctgattcacctgagcaagatctgatagctacanaatggaaaaccagttaaggatgaatatgtgctcgaaccaattgaaaacatcacttctgcgaactacgtgcttggagacccatacctggatgttactagttatctttcaaccaatgatgaacttttcttggaagctaatgatttttcaaacccgatttacccagaatctgaactttttgacatcaatgagtatctttcattcgatgatgctgatgatcagtctttggcctttgattatgatgaaattgtgggaagtgagattcctgtttctggccaagaacctcttactgaaacgcatacaaatgaaggaactgaacaagatcttaatgctggtgaacatgttgaagaacatggcaatagtgatgcatcctcttcaaagcaagagctggaggctacagaatttgatcttggtaccaagtatccatttatgaaacgggctagtcacatgttgggtagcctccctgctcctcctgca

SEQ ID NO: 17215 - DNA, 611 bp, Gossypium hirsutum
  unsure (1)..(611): unsure at all n locations; Clone ID: LIB3830-002-Q1-K6-D2
ngaaatgaagtcaaggttcaacaagaggatggtgctaaaagcttgaaaatggcggtggctctagcaagaatggtgagggttgtagtaacgttagcaaagtcaatgatcaaggtggcggtggtgcagcttgtaaaaacggtgtacaagttaaggagccgaagcctgaggtgaagcaaaatgtgatctcggtagccggtaatcagtcatcggtggctgagaagaaaggtggtggtggtggtgccggcggtaatactgagggtaacgttaatggtaatgctggtgagaaaagtggcaatggcagtgggagtaaaaagaataaaaagaaggggcaaaaagctaatgctgatgagggtggtgagcagcatcctggtgatgcagtacctgcatccattggatcacattttaaagtgcatggaccccatggttcagttcccatgccatccccagccaatcatagcccaccacgtcagcacccaatgtacgagtacccaacgtattaccatgcaccaccggtgtacctcactagctacaacatggcgtatccaagcagtagctatactgcatcctattacacctcaccaccaccgtattcgtatgcatacatgcacccg

SEQ ID NO: 17216 - DNA, 643 bp, Gossypium hirsutum
  Clone ID: LIB3830-002-Q1-K6-D3
ctttaaataggtaggacggcgcggctgcttcgttgagccgcgccacggaatcgagagctccaagtgggccatttttggtaagctaactcagcagatgtgggatgcgaagaacatgatgtgtgctgctgaccctcgccatggtcgctacctgacagcgtcagccatgttccgaggcaagatgagcaccaaagaggtttttttacagatgatgaatgtccagaacaagaattcatcttacttcgtggagtggattcccaataatgtgaaatccagtgtttgtgatatcccaccaaggggtctgaagatgtcctctactttcatagggaactccacgtcaatccaggagatgtttaggagggtaagcgagcaattcacagcgatgttccgtcgcaaggcctttttgcattggtatactggtgagggaatggatgagatggagttcacagaagcagagagcaacatgaatgacttggttgcagagtatcaacaatatcaggacgcaactgtggaagatgaggaagagtacgagggggaagagggtcttgatgagaactatgagacctaaaatgcgttgggcattaccatatatcaaaacctgcgtgaagttcgagaatagcagcaacttttgcctagttatatactg

SEQ ID NO: 17217 - DNA, 630 bp, Gossypium hirsutum
  Clone ID: LIB3830-002-Q1-K6-D4
aaatcccctcaaagaaacataattctccgcaatttcccaaatctgcatctttagggttctgtttttaactttcaattcccaaactcaaatgcaaaatgtacggattcgaagctatgacatttaacatccacggcggttacttggaagcgatcgtgagaggtcacagggccggactcttaaccgccgccgattacaactatctttgccaatgcgaaacccttgatgatatcaagatgcatctctccgccaccgagtacggcccttatctccaaaacgaaccttcaccattgcatacgactacaattgtagagaaatgcactcttaaacttgttgatgagtataagcatatgttatgccaagctacggagccattgtccaccttcttagaatatatcacatatggtcacatgatagacaatgttgtcttgattgttactggaaccttgcatgagagagatgttcaagagctcttggagaagtgccatcctttgggcatgtttgacagtatcgcaaccctggcagttgctcagaacatgcgcgaactctacagattggttcttgttgacactcctctggctccatacttctctgagtgtattacctctgaggatcttgatgacatgaacattg

SEQ ID NO: 17218 - DNA, 645 bp, Gossypium hirsutum
  unsure (1)..(645): unsure at all n locations; Clone ID: LIB3830-002-Q1-K6-D5
caaacccaaaacaaactaagtgaaaactcacaaaaggtttccagaacacgagatttcattcccgaaaacatgcatctcgaagataatgaagaagaagtaggattcaacctcaaatcctcagctccttctcgttctcatggggttcaaccgttgggaaacctttacttcaacccaggcgctatcaactcaagaaacatcggcttaggtactctccaaatcctgtctgacgagcttgttcttgagattttaggccttttggaaggtacccagttaggtgttttagctactgttagcaaatcattttatgttttcactagccatgaacccctttggaggaatcttgtattggataacctgaaaggacgatttttttataatcggtcatggaaagttacttacatatctacatttcatccttcatttgatgtttcaaggagtgcccgttcttcgggtttgagagtaagggatttttattctgactatttgtttcagagttggctgtgcgctaatcttgaaatgaaacctgaatggcttgaaagagaaatataattcgaaaaagaggattagtgttgatgattntctgacaaacttcgaagaacctaaaatagccgttntgttggaagggtgcatggactaattggatgc

SEQ ID NO: 17219 - DNA, 660 bp, Gossypium hirsutum
  Clone ID: LIB3830-002-Q1-K6-D6
tgacaacaagcctggctcttccgccgaagttgactacaagacaaaagccggcaccgcttggagccattcctatctcaaccagaaaccatggcatcccctctcctaccctaaccaacgccgcaaatggatcgctgagcagacccatgcccagcgcgtgcgccgtgccgatgaagtcgctcgcgagtatgcccaatatcattaattctttcgccagacggctctaatttccaaaaaagagaaggaaaaggtggagatgatgaaagctgttagctttatgtatgttcgtccgcctggttataatgctgaaagtgccaaagcggccgagattgctgatgagaggaaaaaaactgatcataacaacgtatccgatgatcattctaccgatgtgccttccacagcaatgcagccggaatctttgcccggtggaggtgctactactcaagagaaacggaaatcaagacctaaagatgtttttggacgttctttaccaacagaggaagagtttgaagttcttaaaaacgctccacggctggagactggtgttcctggtagggttaaaccatttgctgttgaagtccgtaatgtaaaatgtcttagatgcggaaattatggtcaccagagtggtgatcgtgattgtccattggaagatgctataatgcc

SEQ ID NO: 17220 - DNA, 648 bp, Gossypium hirsutum
  unsure (1)..(648): unsure at all n locations; Clone ID: LIB3830-002-Q1-K6-D7
cggagctccacccgtcctcccaatctacgacgcaatggctccaggcccatcgctagctccggcaccagcacccggacccggcggacctcaccatcatttcaacggaatgaggcaagtcaaagatttcatccaaactctgatacaatacggagggtacgatgaaatggcggacattttagtgaacttaacatcgtttttttttgaaatgggacgcctggtttccgaaggttacgttttaaccgttttagcacccaacgacgaggcaatggcgaagctaacgacggaccagctgagcgaacctggcgcgccggagcaaatcatatattaccatataatcccagagtaccagacggaggaaagtatgtacaatgcggtgaggagatttgggaaagtgtcgtacgatacattgaggttgccgcataaagtgttggctcaagaagctgatgggtctgttagattcgggcacagcgatggatctgcgtatttgttcgatcccgacatttataccgacggaaggatctccgttcagggtatcgacggcgtccttttcccgccggaagagaaagctaaggaagaaaagaaaacctcaaagttgccactgtgaaacccagaagaggnnaagtgcttgaagctgcatgccgaatgctt

SEQ ID NO: 17221 - DNA, 653 bp, Gossypium hirsutum
  Clone ID: LIB3830-002-Q1-K6-D8
ggataaataaatcgtcacagtgcagtgtctttaatattgctctctgactcttttattttaattatatataaaccatccggttttgggaaaggcctaaagaaacaaatcaataattgcaattaattaatttggtgaaattatggcttagtccctccattatgttcaaatttacagattttcgccattagcaagtttggttaaaacgtaggcattgatttgatttcttcagaaataatccttttgatgctaaaaaaagttaatgtgggcatagtttttaaggaaaaactcacttttaaacggataattaattatgttaattatttagccactgatattatgaaaaagggagtaaattaaaatattcaatttgaacaaagtggaagacctaaaaataggattaaacccattaatttaaacaaaaaggagtgtgtaattaaaatttgaatatttaaactgactaattagtattttaatggatgtgggatttggatttgacagacagataaagcttcaatgcttgatgagatcatcgactatgtcaaattcctccagctccaagtgaaggtttaaatttttttctattaattaagattcctgtcagtctgtcttggttgacatgaattatttaatgtgtttattaatcattatttttt

SEQ ID NO: 17222 - DNA, 645 bp, Gossypium hirsutum
  Clone ID: LIB3830-002-Q1-K6-D9
ctgtcgccaaacgttctagggtttgaaatcttatcttcctcaatggcggagaaagaggcgtcgccggagcccgccgaggccaacccaccaactgaagacatggatctcgaaaaccttgactcctccgcccaaaaccctaatgccggagtcgggtcgtgtacggctcggtccgaaggagttcgggtcgtcttctgttatgttggattacttttgctatttgctttatcattggggtactcaactgaactttaacaagtatgaacatatggtattgctggacttgcttaaaaaaggtcatctagagcctgagagaaagattggtggaggggtcaaagctttccaaatccgtaatcatccccagtggaagagtaaatgtttctttgtgattagggatgatgaaactatggatgattttagcttccgcaagtgtattgatcatatccttcccttgcctgaagatttgaagggaaagagcaattcaaacagggcatcgggtggcggtggcagttggagaggacgtggtgggaaaggaggcggacgaggccgtggaaaaggtggtaagtcaagaaactaaggtggtagtagtagttaaatggagttgaatttggattaaactctttggtaggaccagaactgctttggttt

SEQ ID NO: 17223 - DNA, 653 bp, Gossypium hirsutum
  Clone ID: LIB3830-002-Q1-K6-E1
gcagacagttgttggatcttcgatgtgccggagacacttgatgagcctgaagaatttcaaactgaaagtggtgggatgcgtagagttcgaggacgtacgctgcttagagatttatatgacttagatcttgtcgagcgtgttaaagtaattagaaatactcatggtcagcctgttggatctgaagctcgacttttatcaggctatttgggcattttagcacgaaatgcaaatatgttgcccatcaactacgaatcatggcatcacatgcctgatagtaacgaaaatcaagctctcgctaatattaagaagtctccgatgattatatcaagaaggcattaggtaaaagatggagagacaataaaagcactttaaagaaataatattttaagcaagacataagcctcaaggaaaaattgagaaatgtcccgccgggaatgctgaggtatcaatggaaagatgcggttagattttggaattcaaagaaaggagaggaagtcaaatccggacaaaaagttggacgccttcaactttttgagattacgcataggaagaaagatggatctcctatgacatccaaagctggagaaatatggagaaactaaaggagaagaaggcggaatatgaagcgattgcttcgagtgatagttctgtta

SEQ ID NO: 17224 - DNA, 527 bp, Gossypium hirsutum
  Clone ID: LIB3830-002-Q1-K6-E10
ctttgtttaacgcttaagattcctttaacaacaatggctgcctcaatgtctactctaatggttgttctcgtcgctgtatgcgctctcatgggttccgccattgccgccgacgctccggctccgagccccacctctggtgccggctctatctctccttcatttgtctctgtttccgtcgccgccgccgctgtgttcctgcttttcggatctagacttcggatctgaatgatgctatctctggtgttcacatcgatgctctgtttttcttttatatatgtatttttttctttttgatttgattttgaatttggtttggaattttagtagctgtggtagtggatctagggagtgattatattatatatataaatatataaatttatgagagagagagaggtagttattttatttgttgcacagattattgatggctgatgttttggatttggattattttctgtattattatggattgatgttatagcgagacattttattatttatatatattttcaatattgtttctt

SEQ ID NO: 17225 - DNA, 667 bp, Gossypium hirsutum
  Clone ID: LIB3830-002-Q1-K6-E11
cttcggttgagcagattgacactctgtgaaattgacaagatggtcgttgatgtttctaaacaatattttcctgatgtagctgttggttatgatgatccccgtgtgaaacttcatattggtgatggagttgcatttttgaaggctgttccagaaggtacttatgatgcaattatagtggattcttctgatcctatatgtcctgctcaagaactctttgagaagcccttttttgagtctgtggcaaaggctcttcgtccaggaggagtcgtctgcactcaggcagaaagtatctggctacatatgcacatcattgaggatattgtagcaaactgccgtcaaatcttcaaaggctctgttaactatgcgtggactacagttcctacatacccaagtggtgtgattggtttcatgctttgctcaactgaggggcctcttgttgacttcaagcatccggtgaatcctatagacaaagatgagtgctgctgcaaatcaaaacgaccccttaagttttacaactctgagattcattcggctgctttctgtttaccatcctttgcaaagaaggtgatcgaatcgaaaccttaagggtggaaattttgaagttttagaacaaattctaattattggtgagcattagttatcatcctttgctgtgatggcccaatgt

SEQ ID NO: 17226 - DNA, 656 bp, Gossypium hirsutum
  unsure (1)..(656): unsure at all n locations; Clone ID: LIB3830-002-Q1-K6-E12
aggaagcaaaanagagacaaagaagggggngaaagcccagtcttttgaagcaaaaacagggcaaaggaacagagtgaagagaaagggaagggaaaaatatgggaattttgagggaagatgttgtagtgataagtccagcagagaaagctggggatcccactgtgatatcggtgaattgccctgataagactggattaggctgtgatttgtgtaggattgttttgcactttgggttaagcattgctagaggagatttctcaacagatggaaaatggtgctacatagtgctttgggtggatgggaaaacaaacacaaggtgggatttgcttgaaaaaagctattggaagtttgtccttcgtatttttcgacatctgggatagactattaccggcctgcaaatcagcaaccaaagcgactggatgtatatcttctgaagttttggtgttcttgtgttaggaaagaactgttacatgacataactctggtcctttttgacctggagcttacaataaagagagtgaaggtatccactactccagatggaaaagtgatggacctctttttcatcactgataccagngaacttcttcatacaaaaggaacggcagggtgaaacaattcttcacttgaaaactgcactaggtgatatattggaa

SEQ ID NO: 17227 - DNA, 579 bp, Gossypium hirsutum
  Clone ID: LIB3830-002-Q1-K6-E2
cggacgcgtggtttgctttgaatctttgataatggaagccaaatggctggttcttttttcagtggcggcaatgctgatggcactggccaactgccaggaatctgtgaagccattggtgaagatggtaaagggcaagaagctgtgtgacaaagggtgggaatgtaaagggtggtcaaagtattgttgcaaccataccatttctgattacttccaaacttaccagtttgaggacctttttgcgaagcgtaacacgccggtagctcatgcggttgggttctgggattaccattctttcattacggctgctgctcagtatcagcctcatggatttggtaccactggggaaaagctccagaatatgaaggaagtcgctgcttttcttggacatgtcggcagcaaaacttcatgtggctacggagtcgctaccgggggaccattggcttggggtctttgctacaacaaagaaatgagccctagcaaaatatattgcgatgattactacaaatacacctatccttgcacaccaggagtctcatatcatggccgtggtgccttgcctatctactggaactacaacta

SEQ ID NO: 17228 - DNA, 635 bp, Gossypium hirsutum
  Clone ID: LIB3830-002-Q1-K6-E4
gctgctactctttccctttcctctgtttcgctctcacgtcttcaatcatcgtggcaaatttggcagaatatttccaagtaagggtgtttggtggatcactgaaatttagacataaattcaggttcttgccagtttaagcacaattactaggaaagctatttccaaatgctaaattttgccagaggaagaagccagacaaggtcaaccagatctatgccttttgctggcatggaataccatgatcccaaaaggaagagcaattttgtaggaaaaatccttatggctgctgcccttacagccgtttgcatcatcatgctcaagcaatctcccacattcggtactccaagtcagttctcccgacatgaagaaggtgtaactcatgttcttgtaactggtggtgctggctatattggttcacatgctgctttacgacttttgaaggagtcataccgtgtaactattgtggacaatctttcacgtggaaacataggtgccgttaaggttctacaagagttatttccagaaccaggaaggcttcaattcatttatgctgatctgggggatgcgaaagctgtaaataaaatattttcagaaaatgcatttgatgctgtaatacactttgcggctgttgcata

SEQ ID NO: 17229 - DNA, 610 bp, Gossypium hirsutum
  Clone ID: LIB3830-002-Q1-K6-E5
caaccctttcactgctttccttcaattatttcccacttccttttgccttcaaaatttccttgggattcctatggctaccgctgaggttgcatcagttcaaactgcacttcatgaggagaaaactgaagaatcagtgaaggatcaagaagctacaacagatgaagtagttgccgaagctccagcagcggaaccagttgccgaagagccaaaggaagcggagcctgcggcggtggtagtcgaggaacctgaagcctcagttgaagttgaaaccaaggaggtggtagaagaaccaaaggctgttactgaggagccagtagtagaggaggctcctaaggaaacaatgccagaaccagttgccgaggagatcaaggaaaccactgaacaaaccgttgaaaccaaagaaactacagagtctagtgaggcagcagcagaagcacccaaagaggaagttaagaaggaagaagaagcaaaaccagctgaagtggaggagaaagttgaaacagaagctgatccagcagagaagactgagtaaataataaagcttttgtgatgaaaatgccggtgtcaatggaagtgtgtttcaaatggctacagtttgataagtttgcat

SEQ ID NO: 17230 - DNA, 587 bp, Gossypium hirsutum
  Clone ID: LIB3830-002-Q1-K6-E6
gtaagtcttgaagtatggcttatcgatcttaaacgaccccaaaaaacgatctgctcttggccctgaagaatggactctatatgagcagctagctattgctgctatggattgccaatgtctcgatgttgcaaaggattgcataaaggttttgcacaagaaatttccggagagcaaaagggttggcaggctggattgcatgttgcttgaagcaaagggatcctgggctgaggcagaaaaagcttactcaagccttttagaggacaatccacttgatcaagtaatacataagaggagagtagccatggcaaacgctcaaggaaatatttcagtggctattgaatggcttaataaatatcttgagatatttatggctgatcatgatgcttggagagaacttgcagatatatatctctccctacaaatgtacaagcaagcggcattctgctatgaggagcttcttttgtctcatcctacagttccattatatcatttgacctatgctgatgtactctacacactcggtggactagaaaaccttcaaactgccaagaaatattatgcatccactattgatttgacggggggta

SEQ ID NO: 17231 - DNA, 605 bp, Gossypium hirsutum
  unsure (1)..(605): unsure at all n locations; Clone ID: LIB3830-002-Q1-K6-E7
ggaaaatggatctatgganagagttacacttttcttgaacctggccaatgaccccacaattgaacgaattatcacaccaagaattgccctcacaactgcagagtatttggcttatgaatgtgggaaacatgttctggttatattgacagatatgagttcttatgcagatgctctacgtgaggtatctgctgcccttttttaattccccggaaggcgtggttatcctggttatatgtacactgatctggcgacaatttatgaacgtgcagggcgtatcgaaggaagaaaaggttccatcacccaaattcctattttgaccatgcctaatgatgatataacgcatcctacaccagatcttactggctatattactgaaggacagatatacattgatagacaactccacaaccgacagatatacccaccaattaatgttctcccttcactctctcgattaatgaagagtgctattggtgaggggatgactcgtagagatcatgctgacgtgtccaaccagctatatgcaaattatgctattggaaaagatttcaagcaatgaaagctgtggttggcgaggaagcactttcttctgnagatctgcttta

SEQ ID NO: 17232 - DNA, 471 bp, Gossypium hirsutum
  Clone ID: LIB3830-002-Q1-K6-E8
gtttgggtttagtagttagtaattttaagtttctctattactgtttggtttgggttctctcttttttgatcgatgttgttactgttctcttaaaatcataaaaatggaatgaagtatcttcttttcaaaaaaaaaaaaaaaaaaaaaaaaaaaaaaaaaaaaaaaaaaaaaaaaaaaaaaaaaaaggaaaaaaaaatttacataaatttaaaaaaaaaaaaaaaaaaaaaaaaaaaaaaaaaaaaaaaaaaaaacccccccaaaaaaaaaaatgggggggttttattaaaggaacccacttttaaaacccctgttttaaaaaaaaaaaaattttttttaggggccccaaaataaaaatccccggcccttttttaaaaacccccggatttgaaaaaccctggggttccccaaattaaattctttgcaaaaaactccccttttccccgttgggttaatatgaaaaagggcccc

SEQ ID NO: 17233 - DNA, 652 bp, Gossypium hirsutum
  Clone ID: LIB3830-002-Q1-K6-E9
cattattattctctgtttcgatcttgaagaatccccaaatcccagaaaatcaaattaacaattttatcgaattagcctttaaattatcttgattcaattttgttatcgttgaaattaaggagatcttttttttggtaaaagagaggaaaatggctcaagctgttgaagaatggtataagcagatgcccatcatcatttttttttatctcacagctgccgtagttaccactattggttgctctctcgaaataatatcaccttatcatctgtacttgaaccctaagctcgtggttaagcagtatcaattctggcgcctcattactaacttcctgtacttccgcaagatggatttggatttcatgtttcacatgttctttcttgctcggtactgcaagcttcttgaagagaactctttcaggggaaggactgcagatttcttttacatgctcttgttcggagcttcagtcttgactggcattgttcttgttggaggaatgataccttatctggcagcatcatttgccaagatcatatttctaagcaattcattgacattcatgatggtttatgtgtggagcaaacagaatccttttatacatatgagttttctgggtctttttacctttacagcagcttatttaccctgggtgct

SEQ ID NO: 17234 - DNA, 601 bp, Gossypium hirsutum
  Clone ID: LIB3830-002-Q1-K6-F1
gtgacagataaaaacaaatcaacggagaatcttgcattgcaggaatctacaagctcaaagcatcattctcatccatcagcggtggtagggcatccaatcatgataaataaatacaaattggacaaccgacctactgcttttcaagttaatccaccattgcctgcgggttttgcagatgttgatgttttgaagcaacacttttcacaatacggcgatctcgtctctgtggagctgcaagatgtggaaaaagatgataatacgggatcagaggcatcgcataattgctcggttcttataacttacagcacacaccactccgcagagaaggcttatgcagatggtaaatgctggaagacacataatttacagctttcatggcaaacatctagcaatgaccaacatagtagaaaggaaaccgatgtggagaccaatgaaaagttaacagcatgctgcagtacttcgggtaattgcgagcatatggaatgtttagtaccggaagattcaaagcataatcccatcccaaatgtctaagcatgaaagagtggcttaaaaggcttaagggtcattttgaggccgttttggggatttgtacagttgaggt

SEQ ID NO: 17235 - DNA, 624 bp, Gossypium hirsutum
  Clone ID: LIB3830-002-Q1-K6-F10
gaatcccagatggggggtccaatctttgcctttggaccacatgaggaatcatcgtctacccaatcgcagtcccagaagagtagcacaccagcttcaggtcccttagggacctggcaacaatgccattctggagtagattcattctatggtcctccaacgggattcacaggccattttatcaccccacctggaggtatttttggggttcaaggcccaccacatatggttgtgtacaaccattttgctccagtcggacagtttggactaagtttcatgggtacaacctacatcccatctggaaaacaacctgattggaagcacaaccctgcttcctctgcagtcggtgaaggtgatgtgaaaaatttgaatatggctgcttcgcagggtaattctagcaacatacctgctcaaatgcagcatcttccccctggccctgggtcacctcttctgcccatagcatctccactcgctatgtttgatgtttctcctttccagtccaccccagatgtgtctgtccaagctcgttggtctcctgttcctgcttcacctatgcagtctgctacaccatcaatcccattgcagcaacaggcagaaggtgtactacattctcagttcagccagggg

SEQ ID NO: 17236 - DNA, 510 bp, Gossypium hirsutum
  Clone ID: LIB3830-002-Q1-K6-F11
ggcaagcaagggagggctcattggagttttccatggtcttgtatcagcaacatcaaccacgggaagcagctccaacaacaatcactcatcttctggcaatagtgtcatttctgattgcatcgattcaccagacaagccagtgaaaaggcaacaactcatacctccacaggtattggttccaccatctatgaagtcattatgcctcatactcaagcttcttgagttccgagcagcaagatgaaggaataaacaggcatggcaatcacaatgccgggggagttggtaatacaagcttcgacttcttgatcccagaggggagggtccacggtggaggtctcatgtcattacttggtggaaatctgaagaaccccattgatggaatttgaagtccaaatttactttggaatgaagaaacctattgtggaatttaagttaattattcaactgtggaattgtttataagatctggtggttgtagagagactcggtatatatagttgtgtgttgatt

SEQ ID NO: 17237 - DNA, 658 bp, Gossypium hirsutum
  unsure (1)..(658): unsure at all n locations; Clone ID: LIB3830-002-Q1-K6-F12
ngaggtacacactgttngaaacagcaagtgttgatatggcaccttgtgattcaatagacacaaatgcagaaaatgcttccagttcagggaagagtctaactcttgaaacactttttggaagtgctttcattgaaagaactacaatcagttggagcaccagcttctattcagagggcctcaacggattctgcaagagttgatatatccgaatctaactggcttcccccacatgttacagatgacagtcttcttccttctgcaggtcacattgtgtcaaacaggactaattttgaaaaaaatattttaccatttacccagagagagcgaatgaaatctgatggcattgaagagcatttgttaggctataatgatgctccatctgcagcagattcatcacgtatccgagctggattaggatctaaacttggtggttttgatggatctgctgaaattggacttcctgaagaggatagtttgcttggtgtcagtagtcctgtgaaactccagaatttcatggctggtagtgcaaaatcagagttactgccctcccaagagacaccgattgatgttgctgagaagctagtagctntaaaggccatcttccaggatgaaagacctgtggtaggagggaaagaggtcccgtttttcttcctggtcc

SEQ ID NO: 17238 - DNA, 258 bp, Gossypium hirsutum
  Clone ID: LIB3830-002-Q1-K6-F2
aatcagagatagaagtagaccgaactgtattttgtataatttctagtcttcttgcttttagcatacgtagaccaagtccaatggttttataatagatttaataaatgacatctataattttatgttgcaaaaaaaaaaaaaaaaaaaaaaaaaaaaaaaaaaaaaaaaaaaaaaaggaagaaaaaaaaaaaagaatcaaaattaccttccgccggcaaaacaaaaaaaaaacctttactataggggcccccaaaaata

SEQ ID NO: 17239 - DNA, 624 bp, Gossypium hirsutum
  unsure (1)..(624): unsure at all n locations; Clone ID: LIB3830-002-Q1-K6-F4
gcggcggcgaatttctggggtgatacgccgngaggaagactattacaggtcgcagggtgtacgcaacaccaagtcttacttcgacactcccaacggaacgctcttcacccagagcttcttacccttggataaaaaagtgaaggcctccgtctacatgacccacggctatggatccgacactggttggctcttccataatatctgcatcaacttttccaattggggttacgctgttttcgccgctgatcttctcggccatggcagatccgagggtctccgctgctacttaggtgacatggagaaagttgctgcaacatccttatcattcttcaagcacgtccggaacagcgatgaatacaaagacttacctgcattcctgtttggtgaatccatgggaggagcagcaacaatgctcatgtactttcaatccgaccctgaaacttggactggtctaattttctcggcgccgctctttgtgatgcctgagaacatgaagccgagtaaggtgcggttgttcatgtatggtctgctcttcggattagctgatacatgggcaactatgccggataacaagatggttggaaaagcaatcaaagacccaggaaagcttaagatcatagcatc

SEQ ID NO: 17240 - DNA, 196 bp, Gossypium hirsutum
  Clone ID: LIB3830-002-Q1-K6-F5
aaaaagaaggtcaaaagaatgatttttgctttttaacagtttggggaatggaaactgaactacctttcggctctcctcgaaaacggcgttcgttttttgagcctatttttaaagaactaaaaaaaaaaataaaaaaatggaaaacgaaatgttttatagctttaacaattttaaaagaaaaaactaaattgtttcg

SEQ ID NO: 17241 - DNA, 609 bp, Gossypium hirsutum
  unsure (1)..(609): unsure at all n locations; Clone ID: LIB3830-002-Q1-K6-F6
gaaaaaacaagatcccgccgttcaaccgggaaaaatatcaactgcctcaattcagtagctccaccatgagctccccggggagtggaatattcagtggatttacaaagctatgcaagggactaacggtgatactaatcggtggccacattgttgttcggcttctcccttcttctgttatttaccttgctcttattccggccaggacaatcccttttggttggaacctcataacagctggttatattgaacaatcattacatggggtggttgtgagtgttattggtcttcttttcatggggaagttgcttgagcctatatggggttctaaggagttcttgaagttcatcttcatagttaactttctaacttctgtctgtgttttcactactgctatcgccttgtactacataacgagggaagtaaattacctttacatgcctctttccggcttccatggggtgctggcgggcttcttggttggcatcaaacaaattgtacctgaccaagaactgtctttgctgaaaataaaagcaaagtggctgccatcacttatgctgttgatttcgattgccataagttntttcactccagattcggcaacatatcttc

SEQ ID NO: 17242 - DNA, 651 bp, Gossypium hirsutum
  Clone ID: LIB3830-002-Q1-K6-F7
ttcagtttactcctatttaggttttgacagtacgatctcaaggcatctctagattgtctgttgctatccaatgctttaaatttcaattcaaatcatgccagttaggatttacattgaaggcatcacctgttgtttgtttattacttacaatccaatgaattactatcatcatgttctcctcgtgtagattgtgtttatcttttctagcttactacgtgatgttcctgttgatcctatcatctggtcttgcaggttaaggattcaggctgtggtgttctcccacaagatataccaattctctttaccaaatttgcacagcctcaaagtggaaatagcggtggtgcggggcttggacttgccatttgtagaaggtttgtaaatttgatgggaggccacatatggattgagagtgagggccttgacaaaggttgcgcagtaacgttccttgtcaaacttgggatctgcagcaatcccgatgattcagctatccatcaagcttcatcgcaagttagagcatatcatggaagtgcagatctgagtggacaaaaacctatattaagagatcacggtcatcgagccatctcatccagtcccaatgcacgataccaaagaagtctttagagttacaatgagagaaatacgacttacact

SEQ ID NO: 17243 - DNA, 503 bp, Gossypium hirsutum
  unsure (1)..(503): unsure at all n locations; Clone ID: LIB3830-002-Q1-K6-F8
tttatccacttganaaaatacccaccgagcctccgaaacttactgatttctaccgaacatctcaacaatgttacgctgcaaaggaaagggttgatgagatatccaaagttaaaggaaccgtgttagattctggaggcagtcaagctagcttcttgatgcagtcatacactttaaccaaacgctcattcatttttttttccagagactttggctattattggctgagactactaatatatgttgtagtcactgtctgtattggaaccatttatctcaatattggaaccagctacaactcaattctggcaaggggttcatgtgcatcttttgttttcggttttgtcacattcatgtcaattggtgggttcccttcttttgtagaggacatgaaggtgagtactcgtatgatcgacggtaaaagtaccgtgaaggaactaaggatcgaattgcaatttgttccctctactcaaaatatgagtaaattagttcatgtacaatagatg

SEQ ID NO: 17244 - DNA, 633 bp, Gossypium hirsutum
  Clone ID: LIB3830-002-Q1-K6-F9
gttttatccaaagcaacaactgaggagaatacaaccttatccaatgtgacaaatgaagagttatctccaattcaacagcaggaggcggttcctacagttgattcaggagaaagtcagcctgacattgatcaacagccagtgattggagagcaaggacagctggactttgtacaggagcctattgcaccatgatgttttttttttaagctgttgacctcattttgcctaaataaggaagtctaagactgaatcactcgatgatcaaggtatgaaaaacttctacattagcttatgatgtcttctctgatatttggcagctttggttgtttcggtcgttgcttgcaggactctgtgtctatcttttaccgagttgtcctaatgtatgtggtttaaggatgggctttattgaatatattttggaaagttttaggagtttttcttttgttgttgtttagataaatccatgattagggtttctccttggctgctgaataacttggttttgtgaattaaaagtcctttttaaatttctttgaagtttgctactgtgtgtaaatgctttccgttcattccatgaaatagcttgtagattatttttcagtctctagattgtgccgcaagtgacttttaggt

SEQ ID NO: 17245 - DNA, 621 bp, Gossypium hirsutum
  Clone ID: LIB3830-002-Q1-K6-G10
atggcttgcagacactatcctccaccaacataaaagcttctgcttctgatgtttcaaactggacaaagatggaggttctgttggaagccataggaaacaaatcacaattcaaggctgcaactaacaacatcgaaaaatggtgtggtatggtttgatcaagtttcagctatgcctttggacacttacaaggggcatggttttctaaatgagcttgctgaaatgcttgcagatatcaaacctcgctttattagatttccaggtggctgttttgtggaaggtgaatggttaagaaatgcttttcgctggaaagcaagtgttggaccttgggaagaaagaccagggcactttggtgacgtttggatgtactggactgatgatggacttggttactttgagtttcttcaattagcagaggatcttggtgcattgccaatatgggtgttcaacaatggaattagtcataatgatcaagttgatacatccagtgttctgccttttgtgcaagaggcccttgatggcattgagtttgctagaggtgatgctagttctacatggggtgctgttcgagctgcatgggacaccctgaacctttcgatttgaaattgttgctattgggaatga

SEQ ID NO: 17246 - DNA, 628 bp, Gossypium hirsutum
  Clone ID: LIB3830-002-Q1-K6-G11
gttgaggcgccagttatttgggaggtcaaaaggaggcgaagtcatagccgaagcaaaagccctaaccggcgtcgtagtagccatgatgagcgccctcatggttcacgtgaccatggtagacggtacaatgatagggataattatcacgaaagccggagcagaagacacagaagcacaagtcctggtcatcggattagtctgagcagaagccctgggggaaagaggaatcatagcccaatccgtgaaggcagtgaggagagacgtgctaaaattgagcaatggaaccgtgaaagggagcaacaggaaaatgcaaataattttgagaaagatgctgccaataataacaagaagaatggtagaaatgaatatttgcggaatgatgataagaactatcagcaacaggagtaggcttcacttccagaagttcattaatcctgattatatcaccctgcctggtagtccattgggtgccaaataaactggtggtttaaagtatcttttgggtttaacttaaagaagaaaacaagaagcacctgcaaccactactctctcaactctgttgcattgggtcctaaccacaagcaaggagtaatagtgggattagcaaaggctctacttaatttgctag

SEQ ID NO: 17247 - DNA, 659 bp, Gossypium hirsutum
  Clone ID: LIB3830-002-Q1-K6-G12
cctttttgtcccttgtttatttgatactcccccctctggctgccgctgatgtcgagttccggtgcttcgtcggagggctcgcatgggccaccgacgaccgggcccttgaagaagccttcagtgcgtttggtgaaatcgtcgaatcgaagatcattaatgatcgtgagactggaagatcccgaggctttggattcgttactttccgtgacgagaaagctatgagggacgcgatcgaaggaatgaacggtcaaaatcttgatggaaggaacataactgtcaacgaagcccaatcgcgcagaagtggaggcggtggcggaggatttggaggaggaaacggtggttacagccgcggtggaggcggcggcggatatggtggtcgccaaggaggatatggtggcggacgccgtgaaggtggatacggaaacggtggggggtatggtggaggtggatacggaggtggacgccgtgaaggaggatacggtgacggcggatctcgttactcaagaggcggcggtgcatctgaaggcaactggaggtcttaaatttagggtttcaaagtgggctttgggcctatattgttatgggtttggttttgggtttggtagttggtaattcttaagttactctgttactgtttggtttgggttctctcgtttttg

SEQ ID NO: 17248 - DNA, 669 bp, Gossypium hirsutum
  unsure (1)..(669): unsure at all n locations; Clone ID: LIB3830-002-Q1-K6-G2
ggcagcaccaccacaggagggtcgtggtacaacagnaaaaggaacagaacgaccagtcatccataaggagtgcacgcagcaactttggaggagaaatcagcaaagcttatgctcgctaccaactcaatttggataagcaatccccaaagactggccaaaagccaaaccaaacttcaagtctcctatccgtttcaactcctaagacatcagcttcaatacccgcccgaaagctgaagtccgcaagccctagaagcagtgtggtcggtccagatgatgacggaagaagcatggtgagcattcagtcagaaagaaaccgtaggcatagcattgcaggctcctcagtgcatgacagtgagggcctaggaagctctccatcgcttccaagttacatggtaccgactgaatccacaagagctaagaccaagttgcaaagtccgttgggactagaagccaatggaacacctgagaagggaccaattgcgtctgccaagaaacgcctttcttatccaccttcaccagctaggccaaggcagcacttactaatacagaagttggtgtcatgaatggaaagggcagttagtcattttatgtcataaaaaaataatatcaaagaatgcaagcatctgtacgtgggtatggagaagtccaaaagagcaaaaacaaaagggg

SEQ ID NO: 17249 - DNA, 636 bp, Gossypium hirsutum
  Clone ID: LIB3830-002-Q1-K6-G3
caagcttggtcgaaagacgggaatggatcatttggtgaactttatttaggcgttaatgttcaaagtggagaggaagtggctgttaagctggaacctgtcaagaccaaacatcctcaacttcactatgagtcaaagctgtacatgcttcttcaaggagggactggtattcctcatttaaaatggtttggagttgagggtgaatacagtattatggtcattgatcttcttggaccaagccttgaagatttgttcaactattgcaaccggaagttttctttaaaaacggttttgatgctggcagatcagttaataaatagagttgagtatatgcactctcgtggttttcttcaccgtgatataaagcctgataattttttgatgggtttagggcgcaaagcaaatcaggtatatgtaattgattatggccttgcaaaaaagtatagggatcttcaaacgcacaagcacgtaccatacagggaaaacaagaatcttacaggaacagctcgatatgcaagtgttaacactcaccttggagtcgagcaaagcaggagggatgatctcgaatctcttggttatgtgcttatgtacttccttaggggaagccttccatggcagggtttgaaagctggtataaaa

SEQ ID NO: 17250 - DNA, 564 bp, Gossypium hirsutum
  unsure (1)..(564): unsure at all n locations; Clone ID: LIB3830-002-Q1-K6-G4
gcagtttcgtgtctcctccagnattcctctttccaactgcatttgcaggtgtccagttgaagcgagtttctgcttggaatcgatgctgccgtatcactcggcgactgcttcggctttgatgacttcgatgctcaccatttctcgccaaagctatgtttggctctcggaagggctgtaatatccgcttaatgtatgacaattccagctgagaggatattcttgttaccttgttccgactacaactgcaaccccacctggtcacgggactttaatctgttgtttgttccataaaatatatattttgagaaaaatgattgtgttttggatgaattagcatagtgttatttaataatttcaatgccagttttcatttagaggctaatctctgccaaattaagtaaaatcaccaccttgcaagcccaagtgtcaatggcatgaacatgtagatgatcaaaggagaacaaaagaaacaaattccttctctattatacatgtcaaactcaaacaagaatgcatcttgttggtgtttattgtttttattctgttaaaaatctgatcagcctt

SEQ ID NO: 17251 - DNA, 624 bp, Gossypium hirsutum
  unsure (1)..(624): unsure at all n locations; Clone ID: LIB3830-002-Q1-K6-G5
aatccttacaaactctattgctttatcacattgtgccgactaggattgagccacattcatggcctaattcaacatcgggatcgatcattcaccgtacgttatcaaatcacaatgttgagctctcgagtgaagattcaatgggggttaaattcattggtagcgctaaggttattaacccaaatgctgtgaaccgtccagatggggttatccatggcatcgaacagttactaatccctcaatcagtacaacaagatttcaacagtcggagaaatctccgttcaatctccgccgtgaaaccagaaggtgcgcccgaagttgatccaagaacccaccgcttgaagaaaccggccccgccagtgaaacccggttcaccacccgttcttccgatttacgacgcaatggctccaggtccatcactagccccggcaccagctccaggacccggtggacctcaccatcatttcaacggaatgaggcaagtcaaagatttcattcaaacactaattcaatatggtgggtacaatgaaatggctgatatattagtgaatttaacatcattagccactgaaatgggtcggttagtttcccgaggttnacgttttactgtattagcacccaacgatg

SEQ ID NO: 17252 - DNA, 672 bp, Gossypium hirsutum
  unsure (1)..(672): unsure at all n locations; Clone ID: LIB3830-002-Q1-K6-G6
aaattctagaagtcctcctaccaggtctcaaaaacacaatgagacaggtcctctcttaggttgaaatgtctacctaaaaaggccacattttctcctttggtttcttttttttgttgttgttgtcttactcagaaaaactctggtttatcaaaagatataataacaatggtgaagcgtcagccttttctaaaggattcttttctagagcaacgactggaagaatcaaaaactatattagccaaatacccacctcgaattcctgtgatcattgaaaggtattcaaggacagacctcccagttatagagaagaataagatcctggttcctcgagacatgttggtgggtcagttcattcacattttaagtagcaggctacatttgagtcctggaaaagctctctttgtttttgtgcacaatacattacctcaaacagcaagtctcatggggtgtgtctataattctttcaaagatgatgatgggtttctctacatgtgttacagcactgagaaaacttttggctaaactctcctctgcatctttaatcttcaatgtaaaacattggcaaatatatatacatatctatgtatgtattgttgnaattgttatagctcaattaccctattgatctgtaaatgatgttactatatttaactaaaaaaatgtttatatgac

SEQ ID NO: 17253 - DNA, 641 bp, Gossypium hirsutum
  Clone ID: LIB3830-002-Q1-K6-G7
gttttgctctcgatctctccgcccaaatcttgtagacgccaagcagataaattttgtgattactcttttctttctcagatcccttcgaaagcgattcttcttcttctttttattctttttaaattgaattgaagttgctgattcgaaatgagtacggccgaccttctcagcatcgagcctttagagctcaagtttccttttgaactgaggaagcagatctcgtgtgctcttcaattgtcgaataaaactgataattatgtagctttcaaggtgaaaacgacaaatccaaagaagtactgcgttcgtcccaatacgggggtcgttttgcctcgatccacatgcgatgttgttgttaccatgcaagcgcaaaaagaggctcctcctgatatgcaatgcagggacaaattcctccttcaaagtgtaaaggtaaatgatggtgcatccgcaaaggatataactgcagaaatgttcaacaaggaagctgggcatgtggttgaggagtgcaaattgaaagtggtttatgtttctccacctcaaccaccttcacctgtacgtgaaggttcagaagaaaggtctccaccaagagtttctgcttctgacaatgggcatgcaaatgctgctgagtttgctgcagctgcaaa

SEQ ID NO: 17254 - DNA, 688 bp, Gossypium hirsutum
  unsure (1)..(688): unsure at all n locations; Clone ID: LIB3830-002-Q1-K6-G8
gttatacctcctcctgctacttattttgagaagaacaagctgttgtgaaaaaagtatgacatactttttatcgccgatgaggttatttgtgcatttggaaggcttgggacgatgtttggatgtgacaagtacaatattaaaccagatcttatttcactagcaaaggctctttcttctgcatatatgcccattggatcattcatggtgagccctgaagtttcagaagtcatttattctcaaagcaacaaacttgcactcaagctctacaaggagagaaatattgttgagaaggtgaagagcatttcaccgaggtttcaagatggtctaaaatccttttctgacagtcctattgttggagagatcagaggtaccggcttgattcttggtactgagtttacagacaacaagtcgcctaatgatccattccctcctgaatggggggttggtacatattttggagcacaatgtgagaaacatgggttgctagtacgtgttgcaggggacaacataatgatgtctccaccatttataattactcctcaagaggttgatgaattgataagcaaatatgggaaagcgttgaaggctacangagagagggtgaaggaactcaagtctcagcagaagaaacagtgaataggttatattgatgatggtgaaaattatgtgtgctgcttcgtgtgaactg

SEQ ID NO: 17255 - DNA, 690 bp, Gossypium hirsutum
  unsure (1)..(690): unsure at all n locations; Clone ID: LIB3830-002-Q1-K6-G9
aaaaatctcttcctttttttattccttcctttttcctttcatccaatcgaccaaattcagagcttacaaaagaaaaatggccggaatcggacctttaacgcaagactgggagcccgtcgttattncggaaaaaacccccaaacgccgccaccaagaaggatgagaaagtcgttaacgccgcccgtcgagccggtgcctttatcgaatccgtcaagaaatcgaatgctggggcgaacaaggcagcatcgagtagcactactttgaatacaaggaaacttgatgaggaaactgaaaatcttgctcatgaaagagtgccaactgaactgaagaaagccatcatgcatgctcgaatggagaagaaactcacccagtctcaacttgctcagatgatcaatgaaaagccccagattatacaagagtacgaatccggaaaagctattcctaaccaacagattataggtaaactcgagagggcactcggtgcaaagctgcgagggaagaagtgaggagggtcttatcgttaatcaaacagaagttgaatatggngtccagttcttgagtcctaaaaaatggtgatgtaaataaatgcactctacagttactatggctcgcatgtaataacagcgtcttcgatgttatctgaagactatgactatgactgatgaaatgaagtgtgttcttgactgttgc

SEQ ID NO: 17256 - DNA, 600 bp, Gossypium hirsutum
  Clone ID: LIB3830-002-Q1-K6-H1
gaaaattcctaaaatttcctaatagcagcactaattataaacgaggcttgatcaattcctatctttgaagatcgttaatgttgttcttgaatcttcgatagctggtgaagtaagaagtaaatatcatagagggaaaaaagaaaaaaacagagaaaaaaaattgaacaaatgcattactgggttcgagcttttgcttctgatttctctggaactcctccccagcctcgaagtggtcacaccgctgttccaatcggaaaatccaagatcgttgtgtttggtggtcttctcgacaagaaattccttagtgacatcactgtttatgacatcgaaaacaaactatggtttcagccagaatgtactggaaatgggtcagatggacaagttggtcccagcccacgagcatttcatgttgctgttgcaattgattgtcatatgtttatctttggtggtcgttctggtaacagaaggttaggcgacttttgggtcctagacactgatatatggcaatggtcagagttaacaagtttcggtgaccttccttcatcacgggatttctctgctgcttcagctattggaaatcaaaaaattgttatgtatggt

SEQ ID NO: 17257 - DNA, 624 bp, Gossypium hirsutum
  Clone ID: LIB3830-002-Q1-K6-H10
ccgactatggctggggagaacaggtgccaaactcctgaaattcatccattcttgaagcttctgtagagggtgatgagtttcttgaggatgctaaccctagcaagaagctgaaaccaagttccgacaatgttatgcctgccgaagacaactccgcgaagaccttgtcggacgagctgttggctttggacaatttttttaaatacttccaaatgccgccatttattgaaggaaactgggacgccactattgatgctttcctcaatggagatgcaacacaggatggtggaaacccgatggatctttggaactttgatgatttccctaccatggcggagggtgttttctgagcgaactttccataataactagtgtttgtaaataaagcaacatgaatttggtcaaaatctgttgtgaagttgaagtaaaaaccaagctatatgcatgcttaagccttgcctgcactgctttcagaggtttttagtatgtaccccttttttatgtgtttttttgtagactttggactaaattttaaatttgagtgactgtataagtaattgtgtctgaatttgtctatgtttgaatactgaaaaacatatgaatgtttaaactctgctatttgtttct

SEQ ID NO: 17258 - DNA, 606 bp, Gossypium hirsutum
  Clone ID: LIB3830-002-Q1-K6-H12
cccacgcgtccgcggacgcgtgggcgccaatcagctgtccgccttgaccgaccgtccggcatcgtcttggccctcgatttttcccttttgtaaaccttttttcaccaattcccgaaatggcagtgaaaccctccaaggccgaaaagaaaatcgcgtacgacgcgaaactgtgccagctcttagatgagtacacgcagatcttgatcgccgcagccgacaatgttggctcgaaccagctccagaacattcggaaaggtctccgaggcgactcagttgttttaatgggtaagaacactatgatgaaaaggtctgttaggatgcatgctgagaagactgggaaccaagctttccttaaccttatccctttgcttcagggaaatgtgggtttgatctttactaagggtgatttgaaggaagtcagtgaggaagtagctaaatacaaggttggagctcctgctcgtgttggtctggttgcacctattgatgtggttgttccacccggcaacactggtcttgacccatcacagacctctttcttccaggtgctcaatattcccaccaagattaacaaaggtactgttgaaattatcactcccgttgagctta

SEQ ID NO: 17259 - DNA, 620 bp, Gossypium hirsutum
  Clone ID: LIB3830-002-Q1-K6-H2
tttactttcaagccgtggtttctccttgttccttctttggaccttcactttatacggtctctgtttatccttctctccgatcgacaattacctcatcaacagcggtgcctccctcgattccgtcgtagacaaccgtcgattcatctccgactcgtcgaattcacccgattcccatctctcttctggtcggaccttttcgctctgtgccggaactctccttcctggtctgcctcaaatctaccacaccgctagggtttttaatttgccgtcgaaatacgtcttcaatgtcaaagatccaggtacgcacatggtacgtctccatttccatcgattcaattcatcgagattggatctgggtaactctcgatttcacgttttggttaatgggttagtagctttaaccaattttagcggtggggattttgtaaatcctaaagttatagaatatttgctttacgttaattcagaaaaggttgaaattcgtttcgttccagctaaaaaatcgaattttgctttcgttaatgcaatcgaagtgatatctgcaccaaaagatttggtactagaaactgcacagtatgttaatggtgataaaaatgaggaatttcagggtttaaataaac

SEQ ID NO: 17260 - DNA, 610 bp, Gossypium hirsutum
  unsure (1)..(610): unsure at all n locations; Clone ID: LIB3830-002-Q1-K6-H4
caaagcttcatattatcttttttagttccgcaaagaaaacgaaaaaatagaagaaatacaatcgttttctttttgaagtcgggttttagtttttggggagaaaaaaatgttgggagtatttagcagtgcgatagtgtctccgccggacgagctggtggcggccggttgccgaactccatcacctaagataacggcggatgctctggtgaaacggttccttgagacgaactcctccggcgtgtccatgcagatcggagaccatgtccaattcgcttattctcaccataaagagtctcctttacggcccagatcatttgctgtgaaagatgaaatcttctgcttgtttgagggagcccttgataacttggggagtttaaagcagcaatatggtctggcaaagtcggcaaatgaagtgaaagatgaaatcttctgcttgtttgagggagcccttgataacttggggagtttaaagcagcaatatggtctggcaaagtcggcaaatgaagtgattttggtcattgaagcttacaggcccttcgtgaccgagcaccttatcctncaaaccatgtggttggccatctaattgggagctttgctttcattgtctttg

SEQ ID NO: 17261 - DNA, 611 bp, Gossypium hirsutum
  unsure (1)..(611): unsure at all n locations; Clone ID: LIB3830-002-Q1-K6-H5
gttgatgaaacttacagatttgaaggtttgcgagagcgttacgagattcaccacaagcttcgttacacagatgaggccttaatctctgccgcacagctttcataccagtacatcagtgaccgttttctgcctgataaagcaattgacttgattgatgaagctggatctcgtgttcgccttcgtcatgcacagctccctgaggaagctagagagcttgagaaagagctccggcagatcacaaagtcgaagaatgaagcagttcgcagccaggactttgagaaggctggggaattacgtgatcgggaaattgagctcagggctcagatcactgcaatccaagagaaagacaaggagatgaataaggcagaggcggaggcaggggatggagggcctctagtgactgaagtcgacattcagcatatagtctcttcatggactggtattcctgtcgagaaagtatcaaccgatgaatccgatcgcctacttaaaatggaagagactcttcataagcgagtcattggtcaggatgaagctgtcaaagccattagccgtgctattcgacgtgctcgtgttggtctcaagaaccctanaccgccaattgccagttttat

SEQ ID NO: 17262 - DNA, 623 bp, Gossypium hirsutum
  unsure (1)..(623): unsure at all n locations; Clone ID: LIB3830-002-Q1-K6-H6
gtggctttgaaggtggacttgttgaaccacccanaatacttagaagacaacgcaaccttggctttccagacagcaatgtggaggtggatgacgccgatgaagaaacaccaaccctcagcccatgacgttttcgttggcaanctggaaaccaaccaagaacgacaccttggccaagagggttccaggttttggaaccaccatgaatgttctttatggtgaccaagtttgtggtcaaggtgatagtgattccatgaacaatatgatctctcattacctttattaccttgaccttttgggagttggccgagaagaagctggtcctcatgatatgctcacctgtgaagaacaagaacccttcactgtttctccctcatctgcaacatcatcatgaaaaaaggaaacaaactctagtatatgcggatttatttcaatttgcgtgaatcccacaatggattgctcttaacaattgtggagttttacagcagtttgtgttggttgtataaaatttgagattttctttttcttgtttttactatcaaattgtagctaatagtatgtgattgagtggtgtatatgtctattgcccaaacatggaatataaaattgatttttttatttttccg

SEQ ID NO: 17263 - DNA, 609 bp, Gossypium hirsutum
  unsure (1)..(609): unsure at all n locations; Clone ID: LIB3830-002-Q1-K6-H7
cactacccaacaacccaaaanataaaaggaatcgtttacttgttcgtagcaatttatcgtcatttcaagctcaattctctgaaaatttttgtgctgaacttcttttttctctttgtaccaccatgtgtggaggtgctattatctccgatttcataccgccgtcgcggtcgcgacgattgacggccgatttcttgttttcctatctgaaaaaatccgggttgaagaaggggtcgggtaagagatactcgaagcccgtgatcgacttgggcgatgatttcgagactgactttcaggagttcaaagatgaagaatctgatatagatgattatgatgttgatgatgttttggctgatgtaaagccctttgcttttaacgctacaaagaaacctgcttctgctgtatctcatggttcgaactctgaaaaatccatgcaattcaatggtcaagctgagaaatgtgcgaaaagaaagaggaagaaccagtatcgtggaatccggcagcgcccatggggtaaatgggctgctgagatccgtgacccaaggaaaggggttagggtctggttaggaactttcaatactgctgaagaagctgcgagagcttatgatgctg

SEQ ID NO: 17264 - DNA, 135 bp, Gossypium hirsutum
  Clone ID: LIB3830-002-Q1-K6-H8
cccgggtgcgacccacgcctccgtttttagttcactgagtgttccaataatctactcttctttcagcatatgagaaggtataatgtcttgaagaaggccatggtctttaagcaaagactgccccgaggtgcgcga

SEQ ID NO: 17265 - DNA, 621 bp, Gossypium hirsutum
  Clone ID: LIB3830-002-Q1-K6-H9
gcgaggagttgattcctgaattcctcagctttgttaagggtattgtcgactcagaggaccttcctttgaacatctcaagagaaatgttgcagcaaaacaagatcttgaaggttatccgcaagaacttggtaaagaagtgcattgagctcttctttgaaatagcagagaacaaggaagattacaacaagttttatttttttttttcaaagaacctcaagcttggtatccatgaggactctcagaacaggactaaaattgccgaattgctccgctaccactccaccaagagtggtgatgagatgaccagcttgaaggactatgtgaccagaatgaaggagggtcagaatgatatctactacatcactggtgagagtaaaaaggctgttgagaactctcccttccttgagaagctgaagaagaagggttatgaggtcctttacatggttgatgctattgatgagtatgctgttggacagctcaaggaatttgagggcaaaaagcttgtgtcagctaccaaggaaggtcttaaacttgatgagagtgaggatgagaagaaaaagaggaagctttgaaggaaagtttgagggtctttgcaaggtcatcaaggatgtgctgggtgac

SEQ ID NO: 17266 - DNA, 536 bp, Gossypium hirsutum
  Clone ID: LIB3830-001-Q1-K6-A1
gttgatgggtcctttgccggccaaatggggaactggtggagataaatggaagagcttgtctgatgctgaaaaacaccttatatagcaaaggcagagaagcgaaaggtcgagtatgaaaagaacatgaaagcctacactaagagacagactgaggctcccaaagaagaagagtcggagtctgagaagtcagtgtctgaggtgaatgatgaggaggatgaggacgatgaagaaggcagcggagaggaagaagatgatgactaagaaggaaggaagacttgttggaggagatatagcataacgagtataggctggtgcttaattggttatatgttaatgcttttgatgttcccatgttattctctctagatgggcatatgcatgtcatttaaagggaaaaaaaaatgtacctcttaatcctcttagtttctttcgacctttaagaaattaatagcctcaaaattgtacttttgattctaacgttgaagaatggcttgtaaacatatcctttttagatgatgaagttgatgcgttaattt

SEQ ID NO: 17267 - DNA, 485 bp, Gossypium hirsutum
  Clone ID: LIB3830-001-Q1-K6-A10
gtcacgtggcaggaaatgaagagggatgaaagaagttggaccggggtgagtgtggttgtgggcgacaggctgtttgtcatttcagaatacggtgattgcccgatgaaggtatatgttcctgatcgtgacgcgtggcagtacgtaggtggtgataaatttccacgtgaggcaatgcagaggccattcgctgtgagtggagtggaagggagaatctacgtggtgtcaagtgggctaaatgtggcaatagggacaccaatcgagggacaaaacggggagttcatagcgaagtgggaggtggtcgctgccccaatggctttccacgacttctcccctttgagttgccaagtgctttatgcctagaaatccctctttcatacaaaatgctacctataactgtaaggcagtggagttttacactttttacatgtgctcttttttacgtgtaaattgttcatgttcccggaggaatataagagctggtttac

SEQ ID NO: 17268 - DNA, 507 bp, Gossypium hirsutum
  unsure (1)..(507): unsure at all n locations; Clone ID: LIB3830-001-Q1-K6-A11
ttttttgaacaccggnatccacacctcccgaccgcacgagggtagccgccctgttctgaaccccacagcatcagctgccgatcgttcctacggtttttcaccatcacttgtgttgttgacattagggtttgctgttttcaagtactactaggcaaccaatatttctatttctatgttcttatttatgggttgtttgtttaaagtatattctttttagtggtctgaactgaaaccattgttttctagagcatattgggtgattgtttttaaataaactggttaatttgaagtttgcaacaaattaaaaaaaaaaaaaaaaaaaaaaaaaaaaaaaaaaaaaaaaaaaaaaaaaaaaaaaaaaataaaaaaaaaaaaaaaaaaaaaaaaaaataaaattgaaaaaaaaaaaaaaaaaacccaaaaaaaaaaaaaagggggggggcctttttgaggagaaaaattttgttccgcggggttgcgagagtaaattttttttttgggggcccc

SEQ ID NO: 17269 - DNA, 599 bp, Gossypium hirsutum
  unsure (1)..(599): unsure at all n locations; Clone ID: LIB3830-001-Q1-K6-A12
gtctttgggtngttgaattgtgggatcagaatggctaaagtatctgttgacaaagcaactgaagttgagaaacacttgttcatgataaggaaaatgggaaacttgacaaggatccggttcatagcgagcccattaaattcggttccaatattgaggaatcaaataagggagaagagaaaaagcatctgatgccttttttctcgagcgatgcagttgttgagtggcctgcgcctaagcagatccactctttttattttgttaggtatcgcccttatgatgatccgaagataaaggccaaaattgatcaggctgataaggaggtgcaaaagtggaataaagccaggtttcagcttactgatgaaattaaagcgtacaagtctgatcgagcagagttgctttctcaagtgaaagccctaaatattgatttcgagcaatttaagacaatgttaggtgagaaaaagaaggaactggaaccactgcagcaggctttaggcaagcttcgcaataataacaatgagggtggtcgtggtggtatatgttcgtctgaggaaagactcaatgattttatctatagccttcaatatcgcatccagcatgaa

SEQ ID NO: 17270 - DNA, 638 bp, Gossypium hirsutum
  unsure (1)..(638): unsure at all n locations; Clone ID: LIB3830-001-Q1-K6-A2
agatctcaaacttgagagcctgaatgcaaaagaggaaaacaaaaccctgcaacagcatgaagagtaccacgagtcacacgaatcaaaggagcaaaaagagtcgagaaagaaaatctcgagttccccaaatgggggaaaagctctaaagagcactgagnnaaactacgaagtcgaatatcctgaaaatacccgagtacaaggtaaaacaagatgagggcaaggaacataaacatgaagagtaccacgaatcacgcgaatcgaaagagcacgaagagtacgagaaagaaaaacccgagttccctaaattggaaaagcctaaagagcacgagaaacacgaagtcgaatatccggaaatacccgaatacaagaaaaagcaagatgagggtaacgaacataaacatgagttcccaaagcatgaaaaagaagaggagaagaaacctgagaaaaagcagagtaccttgagtgggctaaaatgcctgaatggtcgaagtccatgtttactcagcctggctcggccactaagccttgaatcatatgacactggtgcatgtgccatcatcatgcagtaatttcatggtatatcgtaatatatagttaataaaaaagatggtgattgggaaatgtgtgtgtgcattcct

SEQ ID NO: 17271 - DNA, 648 bp, Gossypium hirsutum
  unsure (1)..(648): unsure at all n locations; Clone ID: LIB3830-001-Q1-K6-A3
cgnaaacctattacaattcagcattggtgagccatccatggcattggcacgtcttcaaatcctcgtagcactttccttggtgcctttttttctttttccggttgctttaggatatagggctaatgatgtgagatcatggtgcaggaaaactcctaacccacagccgtgcgagtattttttgagccatgatcccaaaaacaccccaatcaaagatgagtcccaatttttcaaaatctccatgcacctcgctctagagcgtgccgcacgagcagaaagtaacacgcattcattgggccctaagtgccggaatggacgtgaaatggctgcatggtccgattgcgtaaacctgtatgagttaaccatccttcgtctcaacaaaactgttgattccggcaccaatctcaataaggatgatgctcaaacatggctcagcacggctttaaccaatctcgaaacatgccagaccgggtttatggaactcggggtcccggattatcttcttcccatgatgtctaacaacgtttcccagttaattagtaacaccctggctctcaacaaggcaccttacaaggaaccaacctacaaanatgggttcccgacatgggtgaaacccngtgacaggaagctgtgcagtcgtcgtcgccagct

SEQ ID NO: 17272 - DNA, 638 bp, Gossypium hirsutum
  unsure (1)..(638): unsure at all n locations; Clone ID: LIB3830-001-Q1-K6-A4
gntctcttcagcagntaagttgcttctttcctttctgctactgttttcttctggtgtttcctgtagtgatgagattgctgcttgtggttctcataatatatctcgtgatcaatatccttcatgcttgaaggttcaagagaaaaggacctccgccttgaattgtttgcatttgagcttggtttctcatcctctacattatccgtataactttcatcatcaccgtcggtgccatccacaaccactcctttagttggcatgctcagtgacttgaacttgaaaagtctctgatcttgacaatctgcttcttttctccgggaagaccgtaactcctctatgtcatcaagatagacaactacttcctcacaaaactgaggcaaagtttccgaggaagatggtgcttttatcctttcatcatcatcctttcgtttcctagtggttgtacaaatccggctgatgttccggttttctgcttttatgtcatctggtggagaacaagtaagggaagcaccaatggtatcagaatttggataggaataagagtgacattggctgatcaaatgagtggcagtctttgccaatggatcaacttgtatgttttttccttcccttctcactaccatctgaatctgcaccaatgt

SEQ ID NO: 17273 - DNA, 626 bp, Gossypium hirsutum
  unsure (1)..(626): unsure at all n locations; Clone ID: LIB3830-001-Q1-K6-A5
ctccgttctttcctttctggtgtttaatcatgttgactctaaaaaaccagtgtaaaagttgtgtttatggtttagtatggggagagatggacaaagaaactaataaccaagaaaacccatctctcctctctaacaataacaccaacaaagaagactgttcccctaagaacaccctggaagctccactgtgactggcggcggaggcgggagtaatgataggctgaaacgcgatgaatggagtgaaggggctgtttcgagcttactcgaggcctatgaaaacaaatgggtgcttagaaacagagccaagcttaaaggccatgattgggaagacgttgcacgttatgtttcggctcgagccaattgtaccaagtcgcccaagactcaaacgcagtgtaagaacaagatcgagtccatgaaaaaacggtatcggtcggaatcggccacggcggagggatcgtcttggcctttatatccacggcttgatcttttattacgtggaaatgctgccgctgccgctgctgctgctgcaccgtctcctccaccatcactgccgctgcctccgccaccgcagcagctacatctgtcagcagtggttcaaccacaaccacctgnccctcttttcacta

SEQ ID NO: 17274 - DNA, 548 bp, Gossypium hirsutum
  unsure (1)..(548): unsure at all n locations; Clone ID: LIB3830-001-Q1-K6-A6
ctttccttctaagctggccttcccagnacacaatctctacatgtatgctattagtataaagttgcaaatacaagagtaatcatataattatacatanaaagaagtaagaattaaggtttgagaagtagaaaaggaatgtttggttggttggttacaggtaaaatgtcatctaagtgtatattttacgttttagattttttgtttgaatttcctgttgtaaagtgtaataataatgtttgacttgtaatgcgtgccttgtaacactttttctgttgagtggtctacccgccgtttgcagtttctagaggtttaggggtatattattaatatataaagaaaatttcataaaaaaaaaaaaaaaaaaaaaaaaaaaaaaaaaaaaaaaaaaggggcggccgccggacgcgtggggtttcctagaataaaagacagtgagctacatcccgtacgtgctctctgctgttctgtggtttattatgttgtgaactggtcattgtttattcccctaatgggttaattgagtttatgtttaatttctttctaaagaa

SEQ ID NO: 17275 - DNA, 645 bp, Gossypium hirsutum
  unsure (1)..(645): unsure at all n locations; Clone ID: LIB3830-001-Q1-K6-A7
cgtggttgtgctgtcattgttcgtcttgtctattttgttttctgtcatgactgcatccgacgatgggttggttagaattgggctgaaaaagagaaattgatccaaacaaccgacttgcttcccggcttgagtccgaggatcaacaggctctcatagcatctatgcaagaaaagttggcctccataataatcactgataccatgaggacacagatattgttngccttgaagaactacatggatgctcagtactacggtgagattggtgtaggaactccaccacaaaagttcactgtgatatttgacactggcagctcaaatttgtgggtgccatcatctaagtgttatttttcggttgcatgctacttccattccaagtacaaggcaagtgagtcaaaaacatataagaagaatgggaaacctgcatctattcagtatggcactggagctatttctggtttctttagttatgacaatgtccaagttggtaacttggttgtggaagatcaggaatttattgagactactaaggagccaggtcttatatttttggcggccaagtttgatgggattttaggacttgggtttaaggagatttcagttgggaaagctgttccagtgtggtacaacatgctcaaacagggtc

SEQ ID NO: 17276 - DNA, 655 bp, Gossypium hirsutum
  unsure (1)..(655): unsure at all n locations; Clone ID: LIB3830-001-Q1-K6-A9
gtttgcttcaanactcgagcaggtgaatgctgttaataataacgaaactaataccattggnacatagnacaatnnatgatccagnaagaaaaaaacaggaaaagacgaggaattgggccaaaaaagatggaggatccgatttttctgcttcaaacttgaggcaggtgaatgctgttaataataatgaaactaataccgttggatatagacaatatgatccagaagaaaaaccggaaaagacgaggaattgggccaagaaagatggaggatctgatttgtctgcttcaaactcgaggcaggtgaatgctgttaataataacgaaactaataccattggatatagacaatatgatccagagcctcccactgatgagaatatcaatgcaatacttgaggaggaagaggctctaattgctgctcacagaaaagaaattgaagacacaatggagattgttcgtgaagaaatgaagcttctggctgaggtggaccaaccaggcagccacattgacaattatgtgacccagctgagcttcgttctttcacgcaaggctgctagtctggtgagtcttcaagctcgccttgcccggttccagcatcgactgaaagagcaggagatactgagtcggaaaagattcctcgttgatgccagctcttt

SEQ ID NO: 17277 - DNA, 617 bp, Gossypium hirsutum
  unsure (1)..(617): unsure at all n locations; Clone ID: LIB3830-001-Q1-K6-B1
gntttgaattccattatctgaaactacgtgtaattgttgtattcctctctctgttgattgaatttttaaacttcgtctgtatatctagggtttattctttttacgaaccctaaaaaaaagaaaaaaagtaattggatattttttttgtgctttttcttggagattttgttttcttttgtcttgaatctttttattgagaagagttgtgtggttcttgattggtatggcggcagggcgagttgatgttcggaggagaattgatgttgagaaattgaatcggggccatgttcatgcaaatcccgttaagaatggatacaattatccatctaatcataagaataagttcgatctgggtcctaggcgatgtgggttagacgatgttgccagggttaaaaatgatgtgaaacagatgatggatgatggggttcagcagcccccggaaaaaaagagaagttttccccgattgtatgggacctggaagacaagaaggaagaattcattcaagacagggatgttgtgacgactaccattctgtcatctccttcttcaccttccaaggtgtcaaatactgtttccaatcaggtttataagcatcaaccgttctctgcaaactgatc

SEQ ID NO: 17278 - DNA, 664 bp, Gossypium hirsutum
  unsure (1)..(664): unsure at all n locations; Clone ID: LIB3830-001-Q1-K6-B10
ctgtattccaaaccaacttggttccctacccaanaatccacttcatgctttcctcgtatgctccagtcatctctgctgagaaggcttaccacgagcagctctcagttngctgaaatcaccaatagtgcctttgagccctcatctatgatggctaagtgcgatcccacgccatggaaagtacatggcttgctgtttgatgtaccgtggtgatgttgttcccaaggacgtcaatgctgcagtcgcctccattaagaccaagcgcaccattcagtttgtcgattggtgtcctactggattcaagtgcggtatcaactaccaaccacccactgttgtccctggtggtgatctcgccaaggtccagagagctgtttgcatgatttctaactccaccagtgttgctgaagtcttctctcgcattgaccataagtttgatcttatgtatgccaaacgtgccttcattcactggtatgttggtgagggtatggaagaaggagaattctcagaggctcgtgaggatcttgctgcattggagaaggattatgaagaagttggtgctgagtcggctgagggtgatgagggtgaagatgatgagtactaagaagtacctgtgattgagtgtgcgtatgatgtctttattacctgttgcttccgtgttatgcaagct

SEQ ID NO: 17279 - DNA, 611 bp, Gossypium hirsutum
  unsure (1)..(611): unsure at all n locations; Clone ID: LIB3830-001-Q1-K6-B11
ngaaactgctgtcccactgtcatcaccaaagtctgaagctaccccaccatccgcagtggcggctgcggctaagtcccctttcaactattcttttgtcgatgttgttcttcgggtcttactatttgcggctactctaacttcagtggtggtcatggctaccagcaaggaaaccgagatggttccagtgccaggcttccctttaatcaggatccaactccaagcaaagttcaatcattcacctgccctcgtatattttatagcagcattatcagtaacaggcttctacagcattatcactgcgttggcatcactttcaatcgtccttaaccctacctattccaaaaccttcttgctcttttttgctttcttcgatgtggtatttgtcgggatcgtggcctctgcaaccggtgcagcaggggccgtcggttatatcggattaaagggcaacactcacgttcgggtggaccaaaatctgcaatgtctacgacaagttctgtcgatacacagcgagctcgcttgcgctctcactgtttgctgcctccttctggtgttgctctcaatgatatcaaccttcacactttacaaaaagatccgcgactagacatatccct

SEQ ID NO: 17280 - DNA, 560 bp, Gossypium hirsutum
  Clone ID: LIB3830-001-Q1-K6-B12
gcaactcgagaaaagcttgctcacccaacatacaaacagaaactgatcgaacacgatgaaaccgagtacaccgatatcttcggcagagcactctggcccggtgcaccacagcgtgtcctgcgaacaccgttcgtctgtgactggaaatcccttcctgctcatgaaaatgaaagtaatcagcctgccatcggtcgatcactaatacatggcatggaaaccgaaatccaacgcttttctgcttcagatcccaatccaacaacaacaggagagatcgaaaacatggcactctatgcaggccaaagtgttggcctaatcaaggagattcttcctgctggagaagtagtgaagagactggttgaaggggctcaacatttgatccgccaaagatttaatgaggactcggtctaaaaatccatttgtaaacatatattgcactttgtttatgtgagagtgtttttaaagcttggttggtgaagctgttacagcattttaatgtatgaaataaatctaaagagactaatataatgcaggaaagaaagctgtaccaagatttttttttt

SEQ ID NO: 17281 - DNA, 585 bp, Gossypium hirsutum
  unsure (1)..(585): unsure at all n locations; Clone ID: LIB3830-001-Q1-K6-B2
gnataaaacagagtattggccggngatgacggaacagtttcatgcacttctctcgttgataaagttaagaaggtggtgagcacatttaaaccttttcttcatgaaagaaggcattcttgaaccagttgccagcggaagctacatgttcgtcaggtaaaagcccgcatgacgtcgctaattacgtgcaaagaatcttggccgctacgttagggtttgaatgcacaaattttacaaggaaagataaatacagagtattggccgggaatgacggaacagtttcatgcacttctctcgttgataaagttaagaaggtggtgagcacatttaaaccttttcttcaatgaaagaaaaagaaatattgttctgctaatttataggaataaatttaattaattgggtcttttgggttgtaaattattgaatgttttttgttttggatttttttatttgtggaattgttgaataacttgcaaggatgattgatgttaattaagtttatcatttgtggctaatgttgttcgagcgttccattggaataaatgtcatattacgcatttaactggatcaagaatgtcacttctttca

SEQ ID NO: 17282 - DNA, 671 bp, Gossypium hirsutum
  unsure (1)..(671): unsure at all n locations; Clone ID: LIB3830-001-Q1-K6-B3
aaatttttgaatgaactggntacaaagttctgttgttagctaaatgaaattggatctcagtatgaaatagcggttatataagttcagtggtgaagtgagcctttatcccaaatagctatggttttcttttagttctttatgaggcttgggattagctgcttaaagaatatgctttctagaaaatccgcttaaagctatattttaggaggacgattcaagagaagtttgtatatgcggtaaattatatcatagttctggtagatttgtgtctatttttgctactttaggtatttgcttcttgcttagatgacttaaaaacagagaatagaaaagcatgaagacaaaacctgatattcagctttatgctataaggttagtgttaagtacctcaattttcatatgctctgtgtttggaagaccaaggtcgccatgtttcgggagagcctgaaatatggagtcaaggttgttatcgaaatctttgtactgcattgacattgatgctcatattttttttaattctctgaacttccaatgttaacttgaaattagttctcaatgaaaaaataatttacatgcttattagttatntcatgtgtggagtttggtcaacgagtttccaatccatgcaggtgatgtatgatgcatctggtgtccgacttcacgctggcgtc

SEQ ID NO: 17283 - DNA, 635 bp, Gossypium hirsutum
  unsure (1)..(635): unsure at all n locations; Clone ID: LIB3830-001-Q1-K6-B4
ggcaattgggaaaatagggcagagcaaaatggcgangacatcatccagcaaagaaaagctcaagctttattccattctcttcgctctgcttatgctgccactccagtcaatctcaagatcattgatctgtatgtgggtttcgcagtcttcaccgctctgatccaggtggtttacatggctagcgtgggatcatttcctttcaactcttttctttctggagtgctttcttgtgttgggactgctgtccttgctgtttgtcttcgcattcaggttaacaaggaaaacaaggaattcaaggatctaccacctgagagagcttttgcagattttgttctttgcaacttggtgctccatttggtgatcatgaatttccttggataaaatcataatttccaggttttgctggactgctgttttctcagtttccggccgtgattcataattttagcatgaaatgaagttcttagatcatcattatgagcttgagcatagatccagaactgtagtaggaatttgatattttatctttggctaaaagagttcaagatcacttgatgagaaacaaaagaatttgagtacagatttgatcgttctgattttttacatgattggattttagcaagcactttatattt

SEQ ID NO: 17284 - DNA, 627 bp, Gossypium hirsutum
  unsure (1)..(627): unsure at all n locations; Clone ID: LIB3830-001-Q1-K6-B5
gtccacagccccataacagacgtcgcaactaccgtccacggcgcaactactgttgctgctgctgtttctggatcatcctcatagtcctcgtgctcgcccttttagtagccataactggcaccgtcctttacgtcttttaccgccctcaccgcccttcattcaccctcgcttccctccgtatccaccgcttgaagctcaaaaccgccgccgactcctcctcttcccatctttcaacccttttcaacttaaccctttcttccaaaaaccccaactctcatctctccttctcgtacgacccattcgtcatttcatgtgtgaccagcaatggcgacgttctgatagggaacggaacgttgccggcattcgtcagtgacggcaaggacgagtcgactttcaggggggttacggtggcgtcgtcttcggatttggacgcggagacggtgaacaacttgagaccggaactgaagaaagggaatggagtgtcgttgaaagttgagatggatactaaagtgacagcgaaaatgggtgggttgaagagcaagnaagttgggattagagttacgtgcgatgggattaaaggggttgtcccgaaaagtaagtcgccggcggcggccaatgtctccggcg

SEQ ID NO: 17285 - DNA, 409 bp, Gossypium hirsutum
  Clone ID: LIB3830-001-Q1-K6-B6
cttcaccgaagagccaaattggtgagcaagctgctgccggttcatccgatcctgatgatgtggaggcagatttagaatctgaaatcgatgtcagtggtgactttgaagctcctatgtgagaacccgatgttaactgcttcaacaggatttgtgcatcgaggtttggagtgttatttggattacagtttattttttttgtttttatcgtactgggaaaatgttgtacagcagacattaacactggcatcggtgttgccttgctttgtattaccttggtttagtgtctcatgttgtacatttcatactttgtgaagcatctttcagaaatgatttcaaagcttgtatgtattgttttgcactacttcggactgtaacaatgttatgattgtattttataattaatccacct

SEQ ID NO: 17286 - DNA, 587 bp, Gossypium hirsutum
  Clone ID: LIB3830-001-Q1-K6-B7
tgtacacccagcaccagcctcttcttttccaaactatggaaagctaatcaaaggacgactgagagatgtggactacccatatgttggaaatcattttcagcagggcaggccacaggaggtggttatattcatcattggtggaacaacttatgaggaatcgcgctctgttgctcagctaaatgccagcaattctggaattcgttttataattggtggaacagcagttctcaattctaagaggtttctgaaggacttagaagaagctcaggggatagctcgaagcaatgccaatgttgtttaagtccaaattgtggcgtatatatatacgggttgagcatgagaagcatgtaaataagcatttgtgggtcattagtttagatgattggcagtggaactgtgttggtaaaagcaatatgacaaggtgagactcgtgaaatcagctcattgtctgtgtttaagatgagataaatggttcgacgatcaccattgcagagtataagtgaaaggtagaattggctaaccccctcattgtattcgtctttagggggcattaccatatttcttctacataaaattttgtaatttag

SEQ ID NO: 17287 - DNA, 639 bp, Gossypium hirsutum
  Clone ID: LIB3830-001-Q1-K6-B8
ttatatatctgtcaattatagtttttgtttgtgtttttaagattggatttatgggtttttttctaacttaagaagaatgggggaaaagatttaattgccaaggatgtcaccgaattgatcggtaacacgccactggtatatctcaacaatgttgtagatggatgtgtggctaaaattgctgccaagttggaggcaatggaaccctgctccagtgtcaaggacaggattggatatagtatgattgcagatgcagaggagaagggtctcattgtaccaggcgagagtgtgctgatcgagccaactagtggtaataccggaatagggttggcattcatggcagctgctaagggttacagactcataattacgatgccttcttcaatgagtttagaaagaagaatggtcctccgagcttttggagctgagctggttcttacggatccagcccggggcatgaagggggctgttcaaaaagctgaggaaattatgtcaaagactcctaattcttacattcttcagcaatttgaaaaccctgccaacccaaagatccattatctgacaaccggaccagagatatggaaaggcagtggaggaaaggtagatgtccttgtctctggtatcgggactggaggtactgta

SEQ ID NO: 17288 - DNA, 352 bp, Gossypium hirsutum
  Clone ID: LIB3830-001-Q1-K6-B9
ttgttctagatccgagttgaaattggagacagagaagaggtgtttgattttctgggatttccatggctgtgaaccttatgaaaggaatgctgtaaaaaagcgtagttgcatgaacttgtgatgcaggtatgctgcaaagcatttcatccataggagacagaaattcaagttttgccctactgtggaggcagcttaatgctgtccagtttggagggttttggtgaacagattcgtgtccatcaacactccattgttgctgtctcgttttgtttctgcgtcacagccttgtttggcaaaactaatgcatatttatgtacattaattcccttgtaaatggtagtacacaatccag

SEQ ID NO: 17289 - DNA, 542 bp, Gossypium hirsutum
  unsure (1)..(542): unsure at all n locations; Clone ID: LIB3830-001-Q1-K6-C1
cggccatggtcgatgacggtactagnagaagtgaattcattnnagtcggaaaatcagncagctccggnnaataccttcagnaaactaacatacctgtgttggaaccaccacaaggccataagacatatcgatactgtccgagcctacaccttcgggtctcactacttcgtggaagttgacattgtactcccagcaaacatggcattgcaagaagctcatgacattggggaatcattgcaagaaaagttggagttactgccagagattgagcgtgcctttgttcatctggattatgaattcagtcacaaacctgaacatgcacaagcacatgctttgtagacaaataaataacctaggatgtcttaagtgctatgtctatgatncctccccctcccccaccccccccccttttctttcctgggattttaccatcaaattctatgaagtatgtatgctgcgtgaattgagccatataaaagcaatttaaactttatggcaaacatttgtaaatgcaacatgtttaatttaatttagttggtgtc

SEQ ID NO: 17290 - DNA, 638 bp, Gossypium hirsutum
  unsure (1)..(638): unsure at all n locations; Clone ID: LIB3830-001-Q1-K6-C10
cggtcgcgtggngaaaatctttgctttctattttgtaaaccatggctcataacattcgtcaccctttcttccttttccaactttttctcatttgtgtctcaccaatgatcggtagccacactgtctcggcaacggctcgacgtttattcgagacacaaacaaccttatcggagctgccacaattggcttcaaaatacgaaaagcacgaagagtttgaatatgaaaagtcagaatacaaacagccaaagtatcacgaagagtaccccaaacatgagaagcctgaaatgcacaaggaggaaaaaaaaaaaccctgcaaacaacatgaagagtacgagaaagaaaaacctgagttccccaaacaggaaaagcctaaagagcacgagaaacacgaagtcgaatatccgaaaatacccgagtacaaggaaaaacaagatgaggataagaaacataaacatgaagagtaccacgagtcatacgaatcgaaggagcacgaagagtacgagaaagaaaaacccgagttccctaaatgggaaaaatctaaagagcacgagaaacacgaagttgaatatccgaaatacacgagtacaaagaaaaacagatgagggtaaggaacataaacatgagttcccaaagctgaa

SEQ ID NO: 17291 - DNA, 650 bp, Gossypium hirsutum
  Clone ID: LIB3830-001-Q1-K6-C11
attcttctccctttcttacaactttcattcttcctctcttacttacccatggcccaggagactcttaactctgaatcaccacccgctgcccccgcccaggaattgtctgtggttgtcgagaagcctcaagttactgagaaagagccacaaccctccgcacctgctcccctgccggagcctgaggttcccgagaagccggctgttgttgctgttgaagaagaagctgttgaagttgagaagcccaaggttgaagaaaaggaagaaactaagataacccagtctgtttccttcaaagaggaaactaatatcgctggtgaacttcctgagcctcaaaagaaggcccttgatgagcttaagcagcttattcaagaagcccttaacaaccacgagttcactgccaaacccgaagcagaagaaaaacctgtagctgagcctgagccaaagaaagaagaagaagaaaacaaggaagagaagaaagaagaaaaagaggaagagacacctgctgctgcaatttcagaagaacccaagatagtaacggatgcacccgccgctgttgaagtcaaggaagaagataatactcctcctccaccaccaccagccgaggctcctgcggccgaagtgggttgtggtggaaacagaggtcgctgaaa

SEQ ID NO: 17292 - DNA, 611 bp, Gossypium hirsutum
  unsure (1)..(611): unsure at all n locations; Clone ID: LIB3830-001-Q1-K6-C12
gtttttatcaggngttgccacctgacctgtgttccagccattgctcaaggataaccttgtggcaaaagggctagttctttcattcataacagacttcttcaaggactatctggtggataatagccttgatgatttaatttctcttctgaagcgagggaaaattgaggacgatctcctgcagtttttcccctccacaagtcgattgctgaaggtttctctgagcattttaccaaggcagggctggtacccccccctgaatacaatgagaaaaaaatatttgaggtaaaattgaaggaaatgaagtctgctttgacaacacagatagtagaggaatctgatatgtctgaagtcattgaaactgtcaaacaacgtgttaaagatgctaaattacctgatattgaggttataaggattctgtgggatgtaataatggatgctgttcagtggtctggaaagaccagcagcagaatgccaattcagctttgcgacaggtcaaaacatgggcaaagctgttaaattctttctgcaccagtggaaacattgagctggaacttatatataaagttcagatgcaatgctatgaggatgcaaaattgatgaagctgtttccc

SEQ ID NO: 17293 - DNA, 633 bp, Gossypium hirsutum
  unsure (1)..(633): unsure at all n locations; Clone ID: LIB3830-001-Q1-K6-C2
ggcatccagtgatgtgaaccaagnacaaagcggatgcactgatcagctagtcgggcttgctccatgtcttccatacgttggtggacaggccaaagcccccaccctggattgttgcggtgggcttgaaacaagtgttggttaagagcaagaatgcctgtgtgtgttgattaaagatagagatgaccccagtcttggcctcaacatcaatgctagtcttgctgcaaccctccctcacacttgtcatgacactgttaacattacggaatgcatctcccttctgcacttggcacccaactcccaggaagctaagttattccaaggatatcaaaagctgacagagaagcattccacatccccacctgcgagtggtaactccacaagcagtgctgcagagaagagtgatggaggaatgggaaagaagcgcgtgggagtagtagagatagctatcggattttcactatgggttttcaacatacaccaaaactctgttgtgtgaatgatagaagtttacacacagctgcggctatgtttgttatatccataatttaagagtttggaccaggatccagttatgtttttatcttaaaatctttttagtttgtctttgattttttttttttgcattatatattc

SEQ ID NO: 17294 - DNA, 600 bp, Gossypium hirsutum
  unsure (1)..(600): unsure at all n locations; Clone ID: LIB3830-001-Q1-K6-C3
cttcttcttcttcgctcctgtagaagtttatttgctcttcaacaataaaaaaataaaaaagctttcctacagcagcgctcaagtttttatcaatccagagtttgaatttgaattgaacaaatcaatattaagataagagaaatggctcgctctctctccaacgctaagcttttctctacttttgttgtcgatggaatctctaacgttatctccagacgaggatatgcggcggcatcacaaggaattgtgtcgagtggaataagaggaggagcgggaaggagcgctgctacggtggccaagaaaacaggggaagagatgtctcgcggagctaaagagaaggtttcgtgggttcccgaccctgttaccggatgctacagacccgagaactgtcccaatgagatcgacgtggccgagctcagatccatgctcttgaagaagcactaaaaaacaagggtgacctggttgcttgctcctcttttncttttggtcgacgaaatagattttaagatttgatgatgtaatattaataataaataatagtacttaacatttttaatcaaattttgtttgacttgctaaaaaaaaaaaaaaaaanaaaaa

SEQ ID NO: 17295 - DNA, 608 bp, Gossypium hirsutum
  unsure (1)..(608): unsure at all n locations; Clone ID: LIB3830-001-Q1-K6-C4
cagnattccttcgtggagaccttcaaagaaaaactgatgtttacagtttcggagtaatcctatgggaacttattaccatgcaacaaccatggaatggactcagtcctgcccaggtggttggtgctgtagctttccagaataggaagcttgccattcctccgaacacctcccccaaattggtttccctcatggaatcttgttgggccgatgatcccgctcaacggccgtcttttggtaatatagtaatagcactaaagaagttgctgaaatctccattgtagcgatgcagaaaggaaaacagtaacaatgggtgtcgtttgaataacctgaaagcagctgattttggagattccactaacttttgtttttggttccaggcaactgtagatgttttatctaacccatttggaaggcagttcccattagaagttgaggcctataacgataattaataataaggggaaaaaaaatagcaaagctgtaatgagttgctgtgtttattattgtaggttttgcatggggggttgccttttcttacataaagcatttgccagtgtatgtaaaatccgaatgtttatgaattcggattggtatgatatgttggtatg

SEQ ID NO: 17296 - DNA, 638 bp, Gossypium hirsutum
  Clone ID: LIB3830-001-Q1-K6-C5
gccaaattggagtcaaccctccatctccggtgcttcgtcttcgtcttacagggaggattcaggcgcggcagtggcgtcttcttcacaggttcgagaggaagaggaggaccgagaccaggactacccgccacagcatcatttccaatttcatagtcctgagcttgagaatcaccacattggtggctttctttcttacagagataactcacctgcttttaatgataattcatcatcggtgattagagatgacacgtggtcttgcataattgttgttttcactttttggtttttcgtttcgatgactttgattctgggagtttacgggccaatgaatctacaacttggtccaaattgttctcttcttattcaaccaaatcctctttttgttcagagtgtgacggtggaggagaaagatggtactaagccaggactcaacctctatggattatataaatctccatctcttgatgaagttactacctggtctgaaacttacacccccactattcaagctgattctcacatggagtggattcgttatctgaacaggggatctcaagttaatatttcatataatgtgaactcagttagctcctctgtttttcttataattgctgaagggagtgaaggccttgctc

SEQ ID NO: 17297 - DNA, 647 bp, Gossypium hirsutum
  Clone ID: LIB3830-001-Q1-K6-C6
ctattcccattaaactttcaatctttcagccataattaagcttcttcccttcagaaacatcgactgaagctgctccaagattaaagaagcttcaatttataatactctgccccttaaactagcaaagcctgatctgctgcataatcgtctaaagaaaaattgatggggataaataagttgctgtgttggttttctgttttcttctttttgttgggtttctctgcttgcagttcgatttctgatggtgtttttgactctttcacttctactggaaggcacctccttcaagctaagaaagcttgccctgttaactttgagtttctgaactacacaattatcacaagccaatgcaaaggaccaaagtatccacctgaaagttgttgttctgcattcaaggaatttgcttgtccttatgcagaacagatcaacgacttgacgaccgaatgcgcttcaaccatgttcagctacattaatctttacgggaaataccctcctggtctttttgctagtgagtgccgtgaagggaaagaagggctcgcttgccctgccttatcgccatcagcatcagcatcggagaatgctaatggtagtcaacagctgatacgtaatccttggatgctggtaatggccgcaatcatagctgcagc

SEQ ID NO: 17298 - DNA, 635 bp, Gossypium hirsutum
  Clone ID: LIB3830-001-Q1-K6-C7
tccacttcttcccttccattttactttgttttagttgccataacgtcaccttccaatacaacccacaatgaggcaacaatatgtcttcactactctcacgttgctcatcctgttttccctcagttgttcaacaacattagcccaatctccggcactggccccggcaccttctggcccgacaaacgtcaccaagtatcctctgaaaaagccggtcaattcaccctcttcattcgtcttctaaagtccactcaagtggccaaccagctgctcggtcagctcaacaattccaacaatggtatgaccgtttttgcaccaacggacaatgctttctccagccttaaatcgggcacattgaattcactcaccgatgaacaaaaagtgcagctggtgcaattccacatcgtcccaacatacctcacctcgtctcagttccaaaccattagcaaccctttgagaacccaagctggtgatagtggcgatggcaagttccctctcaatgtcaccacttcggggaactctgtgaattaacaacagggttgacaaacaccagtgtttccggcactatttacactgatggtcagcttgctgtttatcaaatcgatcaagttcttcaaccattgcaaatatttgcacct

SEQ ID NO: 17299 - DNA, 597 bp, Gossypium hirsutum
  unsure (1)..(597): unsure at all n locations; Clone ID: LIB3830-001-Q1-K6-C9
gttgatgtagaatgatattaggaggtgtagctgctttacatgatgagatttcctggtttaangaaagaagcttttaagtggggtgttcagctctcaagtattgttcctcagaagcaaataagaatactgccgatttcttgagagcttaataagcccagaagtcgaatacaccgtcgcggctgtagctttttgggcgatcgaaaccatctatcaggagagtttcgcacactgcttagaagatgacagtaaaacccctccagaactcaaggaaacttgccaaagatggggcaatgaaagcttcggagagtactgtaattccctccggaatattgtcgatcgacagctagaaaaagcgtccgatgatgtcatcacaaaagctgaagcgacactcctgcgtgttcttgaacacgaagttgatttctggaacatgagccatagaagaacctgaatctacgagactgagctgcatggtttacctttcgcagaacttgatatatcataagcaccaatattaccaaagttgcgtgcatattattgttaaatcaatggtttggtatatacataaacgtacctagaagttatggactctgtttctct

SEQ ID NO: 17300 - DNA, 611 bp, Gossypium hirsutum
  unsure (1)..(611): unsure at all n locations; Clone ID: LIB3830-001-Q1-K6-D1
attaaaacctcagcaaaataaaccaagcaaaggggtggtagtgatgggaaatgcaaattcacaggcaaatcctgaatttggttctcaggttgcagctttaaattcgaacaagttaagtgaaaccatgtcgtctcattcgatactgggngaaaaattctgaatctactcaagctgcagaattacctggatcaagtgacagtgaggaaggatgtgatgaagagagtcgagaagaaagagatgatgatgaaccaaatttgaaaagaaagaatactgcgccggaagctgcagtagtgttgtcacacaagacggtcacagaaccaaaaattatcgtgcaaacaagaagtgaagttgaccttttggatgatggctatagatggcgcaaatatggacagaaagtggtgaaagggaaccctcatccaaggagctattacaaatgcacgagtgctggatgcaatgttagaaagcatgtggaaagagcatcaactgacccaaaagcagtcataacaacatacgaggggaagcataaccacgacgttccagcagctagaaacagcagccacaacatggtgaacaacagtttgtcgcagacaaaacgcacaaggttgtggctg

SEQ ID NO: 17301 - DNA, 663 bp, Gossypium hirsutum
  Clone ID: LIB3830-001-Q1-K6-D10
cggtcgcgtgggctgtgcgagttgggaatatcaaaagcctttgcatacgagtaatatatggagtctctccacaattgtgtattcgctttcatcctgtaaataacaactttctttcagttggcaatgcaaataaagagattactgtgttcaatttcagcacggggagagttattgccaaatccatcttcgatagtgaggttacctcaatggaccatgatcatactggtcatctcattttctgtggtgatgcacagggatgtatatactctgtaactatggactcccgcacaggtgcgttgtcccgttctcatcgttatagaagtagcagtaaacagaaatttccaatcacaactgtgcagtaccgaagtttctcgttactggctggtggcccagtgctgctgacatgtactaaagatggaagtctttctttctttagtgttgctttggaagtacaaggttacttgaccctgcgttgctcgcttaaattaactccgagaatacacagtattcgagcatccttctgccctctgctttccctcaataagggagaatatatagttgctgggagcgaggattcaaatgtctatttctatgatttaactcggccgaaacaacatgcgtaaaaagctacaggtcatcgttttccggttttagtagtagctt

SEQ ID NO: 17302 - DNA, 653 bp, Gossypium hirsutum
  unsure (1)..(653): unsure at all n locations; Clone ID: LIB3830-001-Q1-K6-D12
gtttaaatgacgnccggggaagaaatcgttgatgtcgcgttcaaagctcaaagacattgattgggaagggatggctaagcttttgatctccgatgaggctcgcaaagagttcgctacttttcgtcgcacttttgatgaagttaactctactttacaaaccaaattcagccaggaacctgaacccattgactgggagtactatagaaaaggaattggctctcgcctggtagatatgtacaaagaggcatatgagagtgtagagatccccaagtttgttgacaccgtcactcctcaatacaaaccaaaatttgatgcattgcttgtagaattgaaagaggcagaggagaaatccttgaaagagtctgagcgattggagaaagaaattgccgaggttcaagaacttaagcaaaagatcagcaccatgaccgcagacgagtactttgagaaacatccagagcttaaaaagaaattcgatgatgagatccggaatgactactggggctattgacatctttaagcttttggtctcgactagaatttctgaaccgtttctgttgttttaacccctttttctcttgtgcggtgatctgggttggaaagattagctgtaatgattagaaataattgtgtgaagaaaattatccaatcatttg

SEQ ID NO: 17303 - DNA, 628 bp, Gossypium hirsutum
  unsure (1)..(628): unsure at all n locations; Clone ID: LIB3830-001-Q1-K6-D2
gnaaaacacattccgagctagccagcttgaggatggtgacatagtttgctttcaaaagtctcttcctgttgaaagcactgaacaattccgctatccagatgttccttcatttttggaatatgtgcataatcgccaaattgtacactttcggtctttggagaaacccaaggaagatgatttttgtcttgagatgtcaaggctttatacctatgatgatgttgttgaaagagtagctcagcaacttggtttgaatgatccgtcaaaaatcaggcttacatctcacaattgttactctcagcaacccaaacctcagcctattaagtatcgtggggtggatcatttgtctgacatgctggtccactacaatcagacttctgatattttatactatgaagttttagacatccctctaccagaattacaaggtttgaaaaccttgaaggtagcctttcatcatgctactaaggatgaagttgttatccatacaattaggcttccaaacagagcactgtgggcgatgtgattaatgatcttaagacaaaggtagagttgtctcatcctgatgcagaactgcggttngcttgaagttttctatcacaagatctacaagattttcccacctagtgag

SEQ ID NO: 17304 - DNA, 597 bp, Gossypium hirsutum
  unsure (1)..(597): unsure at all n locations; Clone ID: LIB3830-001-Q1-K6-D4
cttcaactgnnaaaaccaccactgaagctttaccgtctttgctcccacagataatgccttcaacaacctcaaacctggtaccgtcaataacctggacccacaacagaaagtacaactagttctataccacgttattcccaaatactactccttgaacgatctccaatttgttagcaaccccgttagaacccaagctggtcaggatttcggcctcaacgtcactggcctgaacaaccaggttaacgtctcaagcggggttgtcgagactcagattaacaacgcattatatcaaaagaaacctctggcaatttatcaagcggacaaggtgttgttgcctgaagagttttttgaagctaaatccccagcggctgcaccttcaccggcgacaaagaaatcatcaacagggtctaaatcgaactcaagagcatcagcaaccgcagatgagccagcttctgctgataattcaggctcagccggaaggaatatggggctgaaattncgttgttgggcttgcattggcttngcatgggatttctctcatgagcggatatatatgaaggttggtctgcattttttactataaatttntcgtttttc

SEQ ID NO: 17305 - DNA, 632 bp, Gossypium hirsutum
  Clone ID: LIB3830-001-Q1-K6-D5
gtcgcccagcgtccgcttgtaagatcgaagcgagtcagcgacgagagagagagaagagctggatctagctcctctgaattgttacaaaatcagggcgctgctgagatgttaacaaagctttacaattagttgtaaaagatgtaagccgaagctaagattgtgacatttgtgagaagggtgatgcatttataagagagcaaacaggtaacatgtacaagaattctaagaagaagattgagaggggtgttgccttccctacttgtctctctgtaaacaacacagtctgccatttctctccacttgctagtgacacctcggagttggaagaaggtgatatggtcaagattgacatgggttgccacattgatgggtttattgcggtagttgctcatactcatgttgttcagagcgggccaatcactggtaagcaggctgatgttgttgctgctgcaaatactgctgctgaagtggccttgaggcttgtaaggcctggaaaaaagaacaagatgtatctgatgcaattcagaaggtagctgcggcttatgattgcaaaatgttgaaggtgttcttagccatcaactgaagcagtttgtgatagacgggaacaagtcatactaagcgtcttcaatcca

SEQ ID NO: 17306 - DNA, 606 bp, Gossypium hirsutum
  unsure (1)..(606): unsure at all n locations; Clone ID: LIB3830-001-Q1-K6-D6
ggctggncacacagtttacaccctctcagaatgtctcgacacaaatccaagaacgactgttggcttgtcatcgatggccgagttctgaacgtgacaaagttcnatggaagaacatccaggaggagaagaggtgttgttggaatcagcagggaaggatgcgacgaaagaattcaacgatatcggacatagcaagtcagctcagaatttgctcctcaagtatcagattggtgttctccagggtcacacttcaaagaataatgaacaggttggttcaaccgaggagcccaaaaagaaagagatgagtgcattcgtgatcaaggatgacctgacgcctaaatatgcggcagtcgtcgagttcgctgccccactcctggttgctggttcctatttctgttacagatacctcacactaagctcataagtgctgtaatcagtttggttttcaagttcaacctcaacatgccccttcttcccttaaaataattgttggcatagaatgtttacaatgatggtcggttgttcctttcattttatcttcacttgtccttttggttattgttgttgatgattatataagaatgagagttatcatattcaattatcatt

SEQ ID NO: 17307 - DNA, 647 bp, Gossypium hirsutum
  unsure (1)..(647): unsure at all n locations; Clone ID: LIB3830-001-Q1-K6-D8
ngaaacttggagtccctcccctttccttttcacaaaatttttagtttttgctctgccttcatttctgagaaaggaagaggaataataagatggtggatgtttggatgaggtgagaagattaaggaattaattacaaataaattataaaattatatgggaaggaattcagagtcggactcgaatggatggagtcgagctcgaggtttggtagtgaagacgctggtgttaattggaggcgcccttttgctcaagaggtttaccaaatccaccactcgttgggaccacgctagaatcgttgctcgttctcttagcggcgaaaagttctcgcgggagcaagcctctagaaatccagatagttacttcaacatcagaacacttacttgcccagcaacggagatggtggatggttcaaatgttttatatttcgaacaggcattttggaggactccccagaaaccttttcggcagaggtttttcatggtgaagccttgtccaaaggatttgaaatgtgatgttgaggtaagttcttacgcaattagagacgcagatgaatacaggaatttctgtgatcgtccanaggatcaatgcccnactacctgaagaagtattgatgatgttgctgaacatctgacactatatatctcaaa

SEQ ID NO: 17308 - DNA, 629 bp, Gossypium hirsutum
  Clone ID: LIB3830-001-Q1-K6-D9
cttcttcacttttggcacagctcaattgggaccaatcaaactactgaaaaccacactgaaggctttaccgtctttgctcccacagataatgccttcaacaacctcaaacctggtaccgtcaataacctggacccacaacagaaagtacaactagttctataccacgttattcccaaatactactccttgaacgatctccaatttgttagcaaccccgttagaacccaagctggtcaggatttcggcctcaacgtcactggcctgaacaaccaggttaacgtctcaagcggggttgtcgagactcagattaacaacgcattatatcaaaagaaacctctggcaatttatcaagcggacaaggtgttgttgcctgaagagttttttgaagctaaatccccagcggctgcaccttcaccggcgacaaagaaatcatcaacagggtctaaatcgaactcaagagcatcagcaaccgcagatgagccagcttctgctgataattcaggctcagccggaaggaatatggggctgagattcgttgttgggcttgcattggcttgcatgggatttctctcatgagcggattatatgaagttggtctgcattttttactataaattttcgtttttcaa

SEQ ID NO: 17309 - DNA, 634 bp, Gossypium hirsutum
  unsure (1)..(634): unsure at all n locations; Clone ID: LIB3830-001-Q1-K6-E10
cttggatccataagcataaaaattagtgaggctactgggatgttgtgacaatgngaaaaaccagactactgttgtttgattacatcagtaatgggagcttagctggattgctacatgagaagaactgttcttggactgggatgcaagatataagatcatacttggagcagctcaaggtttagcttatcttcaccatgactgtattccaccgatagttcatcgtgatatcaaatccaacaacatcttagttggtccacagtttgaagctttcttggcagactttggtctggcaaagctgattgatgtttcagagagtccaagagcctccaacattattgcaggttcttatggatatattgctccagagtatggatacaacatgaggatcacagagaaaagtgatgtatacagctttggtgtagttctccttgaagttttaacaggcatggaaccaacagacaagagtattccagacggcgtccacattataacttggatcaacactgacgttcgtgaaaagaggaaagattacacaacaattattgaccagatgctcctcataagatcaagcacacaaatccaagagatgcttcaagtgctgggggtggctttcttatgtgtcaatccgtgtccc

SEQ ID NO: 17310 - DNA, 612 bp, Gossypium hirsutum
  Clone ID: LIB3830-001-Q1-K6-E11
tttctttctttcccttgtggtcctttatatatatatatatatcaaaaaccctctttttctctttagaagaaaacccactttttttttttgttgttgttgggtaaaagccaaaaaaaaaaaatgcaagaaccaggtgggttaggcatgatgagtagtggtggcggaagtgaaacgattggagggttaagtagcggtgaagtgtcagtttccggtgaccagaaccgtcatctcaaggcggagatagctacacatccactttatgagcaacttttagcagctcatgtgtcttgtcttcgtgttgctacaccgattgatcagttgtctttgattgatgcacagttggcagagtcgcataacattttgagatcctatgcttcacaacaacaaggtcactctttatcaccacatgaaagacaagagcttgataacttcttggcacaatatttgatagtgttgtgtactttcaaagaacagcttcaacaacatgtcagagtccatgccgttgaagctgtcatggcttgccgtgaaattgaaataacttacaagcgctcactggagtaaccttgggtgaaggcacaggtgcaacaatgtcagaagatgaggatgaactgc

SEQ ID NO: 17311 - DNA, 620 bp, Gossypium hirsutum
  unsure (1)..(620): unsure at all n locations; Clone ID: LIB3830-001-Q1-K6-E2
gttaaatanagctggttcatgttccttcaactgtgactattttctcagtgggcaggaccttggaacaaaatgcaacacagcttcttcatcgttggcaatacgttgcacccaatcttccgaatgatgtatacccagtcgttacgatatcaacgacgaacgccagtgaaaatgggacaaagacggtccttgccacctttgtttcattgttccaaggtggtgccaatgagtttattccattgatgcaagaacgattcccggagcttggactcgttaaggaggattttattgagatgacttgggtcgaatctctattgtttatgaacggactttcaaatgaaacatcggagattttgctcgataggagcaacaggtataccattcttcctccttttgtcaaatcaaaatcagattacgtgagggaaccaatgcctgaaatagcattacaagggctattgctccaccttctagaggtcgacgaaggaggcacagcagttcaaaacttttatgcttacggtggaataatggacgaaatctcagagacagaaactccatttccacatcgaaacggcaccttatacaagataagctacgttatcgcttggcaagaagaggaaaacata

SEQ ID NO: 17312 - DNA, 623 bp, Gossypium hirsutum
  unsure (1)..(623): unsure at all n locations; Clone ID: LIB3830-001-Q1-K6-E3
gnattatccctcaccaaaaaaattcaaacgacgaccaccgtccaccgccgccgaagagaaagaccgtttaaataaaatatggacacaattctccataccgaacctctatctctcactcgcttacgcgccacttcgaattccaccgcttccattcaccatatgccttgccagctcatcttccgtcctttccaccgcctttcctttcctttatccaccgtcaacgccggctccagttctcgcaggtcatccacttttgttgtcgccgcttgcggcactctcaccgccaattccgtctcgccaagaggtggagtatatacagttggggatttcatgacgagaaaagaggatttgcatgttgtaaagccaacaacaactgttgatgaagcactggaagctcttgttgaacacagaatcaccggttttcctgttattgatgatgattggaaattggttggacttgtttctgattatgacttgctagcattggactccatatctgggcgacggactgagaatgacctgtttcctgaagttgatagcacttggaaaactttcaacgaggtaccagaagttactcaacaagnacgaatggcccagtcgttgggtgatttaatgacaccagc

SEQ ID NO: 17313 - DNA, 641 bp, Gossypium hirsutum
  Clone ID: LIB3830-001-Q1-K6-E4
ctcgattctttatcgaagttgagaagagctaatgccgatacctatcgaggcaaactggtacaatctcgaacaatccgtgcaggacaatcgaaacaataaggaagtaaggtttgccagcaggctacatttgagggtctgtttagatggaggctatcatgttcttgatgagtccatttattacagtagtgatttcagggcaacatccaaattcttatggcctcctgccattggtgtcttggagctcgggatcttgaacgcatctggtttgcttccaatgaagtcgaaaaatggacgtggaacgaccgatgcttattgtgttgcaaaatacgggcctaaatgggttagaacgaggacgattgtcaacagttttgctccgaaatggaacgagcaatacacttgggatgtctatgatccttatacggttatcaccatcggagttttcgacaactgtcacttgcaaggaggaagtaacgctgtagattcgcaggaccggagaattgggaaggtaaggattcgattgtctacgcttaataccgatcggatttacacactttcttatccacttatagtgttggaacccaatggagtgaagaaaacaggtgaaattcaattgtcagtgagaattacatgctcatctacat

SEQ ID NO: 17314 - DNA, 648 bp, Gossypium hirsutum
  Clone ID: LIB3830-001-Q1-K6-E6
gcccatttcactgctctcccctagcacgtctccaaaaaagagatctccttacagctaccgtacacattcacacacacattcactgaatgggtcgagtcatccgagctcaacgtaagggtgctggttccgtcttcaaggcccacacccaccaccgcaagggtcctgctcgtttccgcagcctcgacttcggtgaacgaaatggctacctcaagggtgttgtcaccgatgtcatccacgaccctggccgtggcgctcctttggcccgtgtcgtcttccgtcaccctttccgttacaagaagcagaaggagcttttcgttgccgccgagggtatgtacactggacagttcgtctattgtggtaagaaggctactcttgtggtcggaaatgtattgcctcttagatctatccctgaaggagctgtcgtttgcaacgtcgagcatcatgtcggtgatcgtggggttttcgctagggcttctggtgattacgctattgttattagtcacaaccctgataacgacaccaccaggatcaagcttccatctggttcgaagaagatgttccaagtggttgtcgtgccatgattgggcaggttgctggaggtggtaggactgagaaacctctgcttaaggctggtaatgctttccacag

SEQ ID NO: 17315 - DNA, 650 bp, Gossypium hirsutum
  unsure (1)..(650): unsure at all n locations; Clone ID: LIB3830-001-Q1-K6-E8
tttttagaacagnaacgaaaaacaatgagcaacagagctgatgctgtgagacagtcactgttccaagaagcagacaagtattgtaagcacatatcgggaaagctatcacgtggccatggatgcttaaaagctttggccttcttggtcgttgcatttgctgtaggtgctgctgttgtaactcccaacatcgacctctttggactggagcaaactatccgaagctattggcaccgccgactgggacaaactatccgaagctctcagcaccgctgactggaacaaactgtccaaagttttcagctcttaacgatcttccccatctcataaacttcaaatctaggtactttcttttttcgatctagaattttaactggcaacggagaaaaaggtcgtttgatatggcattttaggagaatactattagaatagcggcttaaagaaggggataaaatggtgcaatgagtttggtttttactacaattacttgtatttcaaagtaatttattctcatgaacttagggtttcaaataatttgaggataattttcatgttgaaaaaccttagcttttctcatagtttttcttaggagcgagcataactcgatttaaaattagtcgaaaaccggtgtgatttggttaaatgggttttcg

SEQ ID NO: 17316 - DNA, 632 bp, Gossypium hirsutum
  Clone ID: LIB3830-001-Q1-K6-E9
catccatctcctcctctaaattgcttagacggtgtcggtgatctcctcctccgctcagattttttagccttcgattttttttatttccttttgttctttaaagatccgtttcactggttttcggatatatttttttgcaccgaatccgattcagatcggataaaaaatggcagcatcgagacgattacgtgatctccaatcgcagccgggtaacaagacttgcgtcgattgcaatcaaaagaatcctcaatgggcatcggtttcgtacgggatcttcatgtgtttggagtgttccggtaaacaccgtggtttaggtgttcacatctcgttcgtccgatctgttactatggattcgtggtctgagatccagatcaagaaaatggaatcgggtggcaacgaacggcttaacgcctttttggctcagtatggaatccctaaagaaacggatattgttgctaagtataatactaatgccgcgagtgtttatcgagatcggattcaagctttagctgaaggtcgtccgtggcgggatccaccggttgtgaaagagaatctcaacggagtggtagtggtggtattaggaagccgccgttgagtagtggccgtggtggtgatagggaaagtaattttgc

SEQ ID NO: 17317 - DNA, 490 bp, Gossypium hirsutum
  Clone ID: LIB3830-001-Q1-K6-F1
cggaccggcactcccgggatcgcccagcgtccggtgcttggatctgaacttcaattcgagcagtcgaatgaaagtaggcagcaagagataagtttctaagggagcaaaacattgtatgtgtaagcaatggggatgacagcataagtgatgcaaaaacttgaaagagctatgtctctcaatatggtaccatgacgtcatacaaggttatgcgagatccaagtgggataagtaaaggatcagggtttgttgcattgtcaactacagaagaagcatcaagagctcttgcagagatgaatggcgaaatggtagacagcaaacctctctgtggtgcaccagctcaaaggcaaggaagataggagagccaggagacaggctcaatctagtgaaatgcgaccagttacaatgtaaccttaagggggtcctctaatgccaatgtacccacctgggggtacatgtcttgtgcaggaaatattttatggacaagcaccta

SEQ ID NO: 17318 - DNA, 617 bp, Gossypium hirsutum
  Clone ID: LIB3830-001-Q1-K6-F10
atctccagttttggagtttgttgttgctgttttggtctttgttgttatcaattcgttgaggcaaagacgacgttatggactgcctgtatggccatttctcggcatggtaccgtcgttggtgtccggtcttcggtccgatttgtacgagtggatttcggacatactttgtgaacaaaatgggacgttcaggttcaaaggtccatggtttagtagtctcaattgtgtggttacggctgatcctaggaaccttgagcatcttcttaagtccaaattctctgttttccctaaagggccttattttcgtgacaccgttcgagatcttctcggtgacgggatattcaacgccgacgacgagacgtggcaacgtcaaaggaaaacggcgagcatcgagttccattcggcgaagtttcggcaattaacgaccgagtcattgttggaactcgtccatgcaaggctattgcccgtgttggaaaatgcagtgaaccaatcaatctccattgatcttcaagatgttcttttgagattaacgttcgataacgtttgcatgaccgccttcggcgtcgaccccgggtgtctccgtctcggattaccggaaataccgttcgccaaagcgttcg

SEQ ID NO: 17319 - DNA, 617 bp, Gossypium hirsutum
  unsure (1)..(617): unsure at all n locations; Clone ID: LIB3830-001-Q1-K6-F11
aaaaacaannagatctgatgtacttgcctgtggatcttaattatagacaagatcatgatggcccttgaaataaagaaacatgcagaactgtgaggcaaccttaaaatgcctccagacaaaggggttcccgtacaacctgcaatgtaacaggaattcagttgaaggcattccagagcttaaacatgaattcggtactcatccgggcagagatgttgtagaaccagtttgctctttgagtggagagtttgtggaacttccgaatgaattttaccacaaacctacactccaccacgaatgtggctcatggtcgaccttctatcctgactctcataagttgcaggcataccagttgaatgcttttgggggccaagtttaccactttcctgtggataaccgatttcattatgccccatttaatgtgatcactcatggatacccttgtgaattccagttccaagattttcagtactttgtggtcatagattttgaggctacctatgacaaggagagaaacccacatccacaggagataatcgagtttccatctgttattgtgagtagtgttactgggcagctggaagcttgttttcagacatacgtccgaccaacttgcaacc

SEQ ID NO: 17320 - DNA, 615 bp, Gossypium hirsutum
  unsure (1)..(615): unsure at all n locations; Clone ID: LIB3830-001-Q1-K6-F12
ctttacgcgtccggnaatacaacgaaattctatcactctctagctaaggactttagtgatttgaagcccttggcctggagccacttcactgctgaaggtgatgtcgagttcaaggccgttttgtttgtgcctcctaaggctcctcaggatctatatgagagttactataacaccaataaagccaacttgaagttgtatgttcgacgagtttttatctctgaagaatttgatgagcttttgccaaagtatcttagcttcttgaagggtcttgttgattctgatactctgcctctcaatgtgtcacgagagatgctgcaagcccacagcagtttgaaaacaatcaagaaaaaactcatcaggaaagcccttgatatgattcgtaaaattgccgaggaggatcctgatgagtcgagtggcaaagatgagaaagaagtggaaacatctggtgatgatgatgagaaaaaggacaatacaccaagttctggaatgaatttggaaaatcattaaactcggcatcattgaggatgcaaccaatagaaatcgcttggcaaaactccttcgatttgagagcaccaagtcggatggtaaattgacatcacttgatcagtacatctc

SEQ ID NO: 17321 - DNA, 593 bp, Gossypium hirsutum
  Clone ID: LIB3830-001-Q1-K6-F2
cttgacaaaaaggccaatacacctacttccttcagcttttggcacagactcaagttgggagccaagtacaaactcaactcaaaaccccactgaaggctttaccgtctttgctcccacagataatgccttcaacaacctcaaacctggtaccgtcaataacctggacccacaacagaaagtacaactagttctataccacgttattcccaaatactactccttgaacgatctccaatttgttagcaaccccgttagaacccaagctggtgaggatttcggcctcaacgtaactggcctgaacaaccaggttaacgtctcaagcggggttgtcgagactcagattaacaacgcattatatcaaaagaaacctctggcaatttatcaagcggacaaggtgttgttgcctgaggagttttttgaagctaaatccccagcggctgcaccttcaccggcgacaaagaaatcatcaacagggtctaaatcgaactcaagagcatcagcaaccgcagatgagccagcttctgctgataattcaggatcaaccggaaggaatatggggttgggattcgttgttgggcttgcattggcttgca

SEQ ID NO: 17322 - DNA, 608 bp, Gossypium hirsutum
  Clone ID: LIB3830-001-Q1-K6-F3
ctttgtcagcgtttcacactttctaaactccatatcccaaaacatgggttcaaccggtgaaacccaaatgactcccacccaagtctcggatgaggaagccaacttattcgccatgcaactcaccagtgcctcagtccttcccatggtcctcaagtcggccatagaacttgacctgctggagatcatggccaaagctggcccaggtgctttcctctccccaaaagaattggcttcccagctccccaccagcaaccccgatgcacctgtcatgctagaccgcatcttgcgcctcctggctacctactccatcctcacttgctccttgcgcactcttcctgatggcaaagtggagagactctatggtcttggccctgtctgcaaattcttgaccaagaatgaagatggcgtcactctttccgccctcagtctcatgaatcaagacaaggtccttatggagagctggtactacttgaaagatgccgtgctggaaggtggaattcccttcaacaaagtctatggtatgaccgcattcgagtaccatggcacggatcctagattcaacaaggttttcaacaggggaatgtctgatcactctaccattaccatga

SEQ ID NO: 17323 - DNA, 434 bp, Gossypium hirsutum
  Clone ID: LIB3830-001-Q1-K6-F4
cgtatacgagtggatagaataaaactggtccataagaaagaggtgtggagcttggtgattggatggggtatcctcagtttaatgctttaaaccaagaagtcttttcttcaccatttgtgtcttagctatggtttttgttttcagtgttttaatttccattatatattgttactggcttaagtctctttgatggggctttttactatgcatatttgagcttacatttatttatatatatttgtattctttgggagattttttttgaggggagcttttatatttttcatttgtattgtagggacttctattgtttctttttgtcaaaaaaaaaaaaacaaaatcataaaaaaaaaacaaaataaagaaaaaaaaaagataaaaaaaaataaaaattaaaatgatagcaaaatatagaaaaaaaaaatgggggcggc

SEQ ID NO: 17324 - DNA, 622 bp, Gossypium hirsutum
  unsure (1)..(622): unsure at all n locations; Clone ID: LIB3830-001-Q1-K6-F5
cttagcttaaaaaatcttgatccgtactctcctacttccctcgttatcgtcaatggcttcggacaagaagattaagatcgggattaacggatttggaagaatcggacgtttggttgccagagttgctcttcagaggaacgatgttgaactcgtcgccgttaacgatcccttcatttccaccgattatatgacatacatgttcaaatacgacagcgttcacggtcaatggaagcaccatgatcttaaggtcaaagactctaaaaccctcctcttcggcgaaaaacccgtcactgttttcggaatcaggaaccctgaggagattccatgggctgaagccggggctgagttcgttgttgagtcaactggagtgttcactgacaaagacaaggctgctgctcacttgaagggtggtgctaagaaagttgtgatatctgcccctagcaaagatgcacccatgtttgtaatgggtgtaaacgagaaagactacaagccagagcttgacattgtttccaatgctagctgcactaccaattgtcttgctccccttgctaaggttatccatgaccgatttgngaatcgttgaggtctcatgactaccgttcatgccattactgcaacacaa

SEQ ID NO: 17325 - DNA, 588 bp, Gossypium hirsutum
  unsure (1)..(588): unsure at all n locations; Clone ID: LIB3830-001-Q1-K6-F6
ctcatacgcaacaacaagnacgcctttttccattggatcgaacggccgtgtcgtttattttaattgagtgcttatggcggagccatcttcgtctttatcgtcttccaaggacgagctgtttcagctcatcaagcgtcttggaacttatctcgccctcaagatgtcaaatcttttctcgatctctctccaaaaactggatccgcgatctgttggggctattgcagggcttgctgttgcaattatctttacctataggttgatgagatcacctgcagcacccccaagaaggcaaccaaaacgtcaagctccaacaactagtggctcttctatcagtgcccaatcaaatgcaacattgatgccttctggagcctgttcaccttcagaggattttagagcacaaaatgttgttgatgagttcttccagccagtaaagccaacattggggcaaatagttaggcagaaactgagtgaaggtagaaaggtaacatgccgtttgcttggagtaatccttgaggaaagcagtccagaggagctgcagaaacagcaacagtgaagtcctcagtgttggatgtgctattggagatacca

SEQ ID NO: 17326 - DNA, 633 bp, Gossypium hirsutum
  unsure (1)..(633): unsure at all n locations; Clone ID: LIB3830-001-Q1-K6-F7
gtcgcccagcgtcccatcgtcaaaataanacagaacttttggacttgtcagagccaaactgactttccacacttgtatcagctcttggagcaaaattttcttggtgttgatactgtgaaggcatcagggacaatcaaggagcaacttgctgctatagcgccagcccttgaacagctgtggaaacagaaagaggatattggtatttgttttctgatgtacaatcacagattcagaagatatgtggggaaatcactgggagtgccaatgagcaggctggtgctcctgcagtggatgagtctgacttgtccctaaagaagttgaatgaatatcaagtaaagctccaagaacttcaaaaagagaagagtgatcggctgcataaagtccttgaatttgttagcactgtgcatgatctttgtgctgtacttggaatggacttctttagtactgtaactgaagttcatccaagcttagatgataaaacatgtgtgcagtcaaaaagcatcagcaatgatacactattaaggttggctgagacagtctcagctttacatgaagataagaagcagaggattcataagcttcaagagttagcaactaagctaactgatctgtggaatttgatggacactcctg

SEQ ID NO: 17327 - DNA, 630 bp, Gossypium hirsutum
  Clone ID: LIB3830-001-Q1-K6-F8
tttacctcatcccttccccctaaaccctccgattctagtgcttttgatttgaacttggcattaagaactgattttgttgaaggtaatggaagtcaaaatctgaatgaaaccaatagcatggcaggaggatcagaagataatatccgagagtcaactaggaatcttgattcacaaggagaaggtattatagaaatagcagactcttattccttccggggaagatctgaatccgaagatgtagatgctgagaattttaaatctaggttgaaatgccctcattgccgagggaacgtacttcgctgggaggttgtggaagaggccagaaagtatctaaattcgaagaagagaacttgttctagggaatcttgctcctactctggaagttaccaggaattgcgtcggcatgccaggagagtccatccgacaatacgaccttcagatattgacccatccagagaacgagcctggcgccgccttgagcaccaaagagaatacggtgacattgtaagtgctattagatctgccatgcctggtgcccttgtggttggagactatgttattgagaatggagataggttggcagctcgaagggagatagcaccggtgaagcgagttcaccatggtggacta

SEQ ID NO: 17328 - DNA, 612 bp, Gossypium hirsutum
  Clone ID: LIB3830-001-Q1-K6-G10
gtcctctcctgctgcacttggggcttctgctgttcgtggtgcaccaattgctggccttgggccttgcttacctgctcgtccagtgcctaagaagacatcgacatcacctcctcgaggatcagctgtatcaccaaataataagctggataagcaccaaatgaatgtagcacatgaaactggttccaaaaacaagaaccagttgccaaaactcgtgctgaagccttcgagtggttcttcaaaagcaactgataatccgaataaggatggcctgagagaaaagtctttttccacttctatgcgtgggcaggttcctgaggttgcaattcaatggaggccattgaaacttgtttacgatcatgacattaggctttctcaaatgccggttaattgcagcttcaaagtgttaagagagattgtgagcaaacgttttccttcatccaagtcagttttgatcaaatataaggataatgatggagatttggtgactattacttgcacaacagaactcagattggccgagtcttctgtagatgctcttgttccaatagagcctgaagccgataaaactagtggattcagaacattgagattgcaccattgttgaggtgagtc

SEQ ID NO: 17329 - DNA, 404 bp, Gossypium hirsutum
  unsure (1)..(404): unsure at all n locations; Clone ID: LIB3830-001-Q1-K6-G11
ggggggggggccaccccccccctccccccccccggggggggggggggaaaaaaaagaagaggnnnnaaaaaaaaaaaaaaaaaaaaaaccccccccccgggggggggggggggggggtgttccttctgggggggggggggggggaggggaggaagggagaaacaaccaaccccgggggggggggggggggggggggggttttttttttttggtggggggggggggggggggggggggggnnnnnggggggggcgcccccccccccccccccccctgggggggggggggggccccccccccccccccccccgcgcggggggggggtgaaaaaaaaaaaaaattttgttgggggggggggggggggggggggggggggggggggnggnggcccccccccccccccc

SEQ ID NO: 17330 - DNA, 665 bp, Gossypium hirsutum
  Clone ID: LIB3830-001-Q1-K6-G12
gttttattttgagaaccgctggagatgccacgaaagatcgactaacatgaagtttaggaaccccaagtatttatcaatcttgaatcatttgaggttttatttaccggagatgtaccccaagttgcataggatattgtttttggatgatgatattgtggtgcagaaggatttgactgggttgtggaagattgatatggatgggaaagtgaatggggcagtagagacttgttttgggtctttccatcggtatgcacagtatatgaatttctcgcatccattgattaagcaaaagtttaaccccaaagcctgtgcttgggcttatggcatgaatttctttgatttggatgcttggaggagggaaaagtgtactgaggagtatcattactggcagaatctgaatgagaataggactctatggaaattgggaacattgccccctggtttgatcacattttactccacgacgaaaccgttagacaagtcatggcacgttcttggactcggctataatccaagcattagcatggatgagatccgcaatgccgcggtggtgcacttcaatgggaatatgaaagccgtggctagatattgccatgaatcagttcaagcctctttggagtaagtatgttgactttgatttggagttcgtccaacctgcaatttcg

SEQ ID NO: 17331 - DNA, 568 bp, Gossypium hirsutum
  unsure (1)..(568): unsure at all n locations; Clone ID: LIB3830-001-Q1-K6-G2
ggttcccttctcganaacccacaaaattcccacttttgcgtcctcaactcccgctacatccaacacctcttcaccttcagcgaactctcaccgcctcccctctcccgcttgaaccgctcttaccccgtttcttcccccaatgaatactctctcttcttctccaactgcgcccccgaaacgcgcgtttctatggacgtcattaccgaaatctacaacctcgaccgcgacggttctaaggattacctctccgccggccagacacagctcccttctctttacaccgtcttctctgtcctctacttgttcttcttagcttattgggtctacgtttgttacactaacagacgatgcgtacaccggatccatttattaatgtccgggttgctcttgttcaaagctttgaatctgatctgcgccgccgaagataagcattacgttaaggttaccggaactcctcatggttgggatgttttgttctacattttccagtttattcgtgtcgttttgttatttacctgtcatcgtttgatcggcaccggttggtcgtttttgaaaccctttttgcaag

SEQ ID NO: 17332 - DNA, 628 bp, Gossypium hirsutum
  Clone ID: LIB3830-001-Q1-K6-G3
gcaaaattttaccacattggcacagttaaaaatgtagcttgctgggctttgactgagcctgactatggaagcgatgctagttctctgaagacactgcaacaaaggtagaaggaggatggatacttgagggacaaaaacgctggataggaaacagtacttttgcagatgtgttggttatctttgccaggaatactacaaccaaccagataaacggatatttagttaagaaagattcccctggattgacagctacaaaaataccaaacaagattggattgcgaattgttcaaaatggagatattctcttaaagaaagtctttgttctggatgaggacagattacctggtgtgaactcttttcaggatacaagcaaggtacttgctgtttctcgagtaatggttgcatggcaacctatcggcatatcgatgggtgtctatgatatgtgtgccagatacctgaaggagaggaaacagtttggtgctccattggcagccttccaaattaaccagcagaaacttgctcgcatgttgggtaatattcaagcaatgacccttgttggttggcgcctttgcaaattgtatgaagagggtaaaatgactcccggtcatgccagcttgggaaaagtcgt

SEQ ID NO: 17333 - DNA, 640 bp, Gossypium hirsutum
  Clone ID: LIB3830-001-Q1-K6-G4
gtttgtgatgtccagaagtgaattcccggtttcattcaagcccttccaagtaccctttcatcaggtgaccttaagtgccgagaaggaaagccacaggctgctgttgaccgcacgctagatagtatagcttttagagggtggacagaaacagataatccctggacgtatgatgatgagactgataattccgagatgacttatgtgaatcttcaactgaacccagagcgctatactggctacaatggtacatcggctagaaggatatgggatgctgtctactcggggaactgtcccaaatatccagctgaagagttatgccaagaagaaaaaatactatacaaattgatttctggtcttcactcatctatttcggtccatatagcttctgattatctgattgacgaagctacaaacttgtggggccacaatcttgaaataatgtattatcgggttttacaatatccaaatcgtgttgaaaacctgtacttcacattcctctttgttctccgagctgtgacaaaggcagctgaattcttggaacaagctgaatatgatacaggtaatccaaccgaagacctaaaaacgcagtccctaatgaagcagctactttatgatccaaaactgcaagctgcatgcccac

SEQ ID NO: 17334 - DNA, 595 bp, Gossypium hirsutum
  unsure (1)..(595): unsure at all n locations; Clone ID: LIB3830-001-Q1-K6-G5
ggcactctagctcaagccatccaccgctcaatggagtcggagctgaggatgagtttgagcctgagcctgagcctgagcctgtccctgtctccgcccctaccagtggaaccacaagtgaaagctctgaccaagaggaggaagacaaaggcggtgttcgaaatgaagagatgcgtggtgagaagggagatggaaacagcatttactatgacaaaattgaaggcgctgaatccatcgatgaaacttatgaaatgcaatctgaaattacaaaaaccttgaccatggaagtcagtcatcaaacggtgagaaatgtagaggatcagaaaggctttggtttgagccctgccccggttgaacatttacatgaagaagcaaatggaagcttcaagcattttgaaaaagagccaaagtagatgccaatgttgacttaaatggagaaatcagagaggatttgtactgtccaaatggaagtttcaagaacattgaggaagagaccaaagatgctaacattgacttaatcggagaaatcgaagaggatttgatggacttagatgttgaaaggggttnntagagaaacaaaaacacatngatttgtact

SEQ ID NO: 17335 - DNA, 662 bp, Gossypium hirsutum
  Clone ID: LIB3830-001-Q1-K6-G6
tttggtttcacatcacttgtaaccacaataatcgagtcactcgagtagatttaggtaattccaacctgtctggacatttggtacctgagcttgggaagcttgagcatttgcagtatctggagctttacaaaaatgacatccagggaaccatcccaactgaacttgggaacttgaagagcctcattagtttggtctttttttacaacaacatctcagggaccattcctccttcactagggaaattgaagtctcttgtatttttacagcttaatgacaacaaattaactggacctatccctagggaacttgtcggtatttcaagcctcaaagttgttgatgtctcaaacaatgacttgtgtggaacgattcctaccagtggaccgtttgagcacattcctttgaacaactttgagaaaaatccccgactggaaggtcctgagctgctggggcttgcaagctatgacacaaactgctcgtaaagggcatgttgacgctataaagctttgaattagatatgaatccgcatgaagtaatatgtaaatctgtataccagctcgactgtattagcatctgtaactcaattaccctactcctaaaatgttgaagacgactagtattggtgaatgtaacggtagcgacaagttccttctggtgtgcatcgt

SEQ ID NO: 17336 - DNA, 636 bp, Gossypium hirsutum
  unsure (1)..(636): unsure at all n locations; Clone ID: LIB3830-001-Q1-K6-G7
cctttccctgctttgctctngaaagtccaagtttttctccaatggcgaccgtctctccaactcctctgttgaaagatgagctcgacatcgtgattcccacgattaggaacttggactttttggagatgtggagaccctttttccagccttaccatctcatcattgttcaagatggtgatcctaccaagaccatcaaggtccctgaaggcttcgattatgagctttacaataggaacgacatcaacaggattttgggtcctaaggcttcttgtatctctttcaaggattctgcttgtaggtgctttgggtacatggtttccaagaagaaatacatctataccattgatgatgactgctttgttgctaaagatccatctggcaaagacatcaatgcattggaacagcacatacagaacctactgagtccatccactccatttttctttaacactctttatgacccataccgatccggtgctgacttcgttcgtggctaccctttcagtctccgtgagggtgttaccactgccgtctcacacggtctctggctcaacatcccggattatgatgctcccacacagcttgtcaagccactcgagaggaacaccaggtatgtcgacgctataatgacgattc

SEQ ID NO: 17337 - DNA, 654 bp, Gossypium hirsutum
  Clone ID: LIB3830-001-Q1-K6-G8
aaaaaaacacccctaaagaacatgagaaactgctagcctttgcctttcttttcttcttcttttgggataaaacattagctcaaatagctccggcgccgccgttaaaggtggacaacatcacttccatcctcgaaaaagtggccaattcaccactttcatcaagctattgaaagccacacaggtggctgatcatactaaacaaccagctaagcacaccggaccctaacgacgggataacggtgtttgcaccgagtgacaacgcgttctccggactcaaacccgggacgttaaactcactttccgaccaagagaagcttcagttggttcagttccatatactcccgacgttaatgtcgacgtcgcagtttcaaaccgcgagtaaccctttgagaacccaagctggggatgttaaaggtgggaagtttccgcttaatgtgacggcggaggggaaccaagtgaatgtgacgaccggagtggtgaatgcgacggtggagaatagtgtgttttctgaccgaaggatcgcggtttatcaggtggataaggtgcttttgccgttggagattttgggacagcgccggagccggctccggcgccggttgttccggagaatggtggtttggtttcgagtcctaaaacacggttaagggtgctgat

SEQ ID NO: 17338 - DNA, 639 bp, Gossypium hirsutum
  unsure (1)..(639): unsure at all n locations; Clone ID: LIB3830-001-Q1-K6-G9
gccaccagcaggcatgccctgatgttgaaataaccggtgccaatgataagggtcctgatgctaaaagattgggaaatccgaggggaaatttccgaataaagaagttcgttctagagtttcaaatggacctcttgtcaagagcaaatctgatgtagtatcaaagagcaggaaaccaccaacaggaagcaaaaccatgatacggagaactaagtccgatcaggaagaggagaacagaaagaaaatggaggagttaaggatccagcgccagaagaggatagctgagaggagtgctgccggtggtcttaatccggttacttcccggaggagctctaccgaaagtaaaacttcagcagcttcaacgaagagccagccatcaactcaagacactaagaaatatcggaagccagtccttagaagttccaccatagaacgccttgcaaccgcacggaatacttcaaaggtctcatcggctgaattgaaatcgagccagccgaaaaagccgacattgaaggaaaacaggtattcaacaactcagaaagctgctcctgctaaggaaaagaaatcaagcacaaacaaagccaaagcttcagatataaaaagtggtacaaataaagactttcctagtggncgatatgcaca

SEQ ID NO: 17339 - DNA, 648 bp, Gossypium hirsutum
  Clone ID: LIB3830-001-Q1-K6-H1
gtgactctgccgtcggtaagtctcagattcttgctcggttttccagaaatgagtttagtttagattccaaggccaccattggagttgagtttcagactagaactcttgttattgaacacaagagtgtcaaggctcagatctgggacactgctggtcaagaacgatacagagctgttacgagtgcatactataggggtgctgttggagcaatgctggtgtatgacataacaaaacgtcagaccttcgatcacattccacgttggctggaagagttgcgtggccatgccgacaagaacattgttattatcctgctcgggaacaaaagtgaccttgaaaaccaacgagaagttccaaccgaggatgccaaagaatttgctcaaaaggaaggactatttttcttggagacctcggctcttgaagcaactaatgtggagactgccttcatgactgtgcttacggagatcttcaacatcgtgaacaagaagaacctggttgctgatgagaatcaggggaatggcaaccccgcgtctctagcaggcaagaagatagtcattccaggtccagcgcaagaaattccagcaaagagcaacatgtgctgtaggtcatgatttaattggatttgtctcctattgtcaggttttttatttt

SEQ ID NO: 17340 - DNA, 615 bp, Gossypium hirsutum
  unsure (1)..(615): unsure at all n locations; Clone ID: LIB3830-001-Q1-K6-H10
atggtggccttccntgaagnactaattccacatcactgattaaagaagccattcacgtaattagctgtggttatgaagaaaaactgagtggggcaaagagatcggatggatttatgggtcggtgacggaggatattttaacaggtttcaagatgcattgtagagggtggaaatcggtttattgtgtacccgaaaagaccggcattcaaagggtccgctccaatcaatctctcagatcggttgcaccaagttttgagatgggcacttggctctgtagaaattttccttagtcgtcactgtccactttggtatggttatggcggaaaactgaaatggctcgagaggcttgcttatatcaacaccattgtttaccctttcacctcgatccctttactcgcctattgtactattccagctgtttgtctcctcactggcaaattcatcatcccaactctaagcaaccttacaangtgtgtggttcttggcacttttcctctccatcattgcaactggagtgcttgaacttcgatggagcggggttagcatccaaaactggtggcgcaatgaacaatctgggtgatcgggaggtgtctccgcccatcttttcgccgtcttc

SEQ ID NO: 17341 - DNA, 622 bp, Gossypium hirsutum
  unsure (1)..(622): unsure at all n locations; Clone ID: LIB3830-001-Q1-K6-H11
cccaatgctgtgaaccgtccagatggggtcatccatggcatcgaacagttactaatccctcaatcagtacaacaagatttcaacagtcggagaaatctccgttcaatctccgccgtgaaaccagaaggtgcacccgaagttgatccaagaactcaccgtttgaagaaacctgccccgccagtgaaacccggttcaccacccgttcttccgatttacgacgcaatggctccaggtccatcactagccccggcaccagctccaggacccggtggacctcaccatcatttcaacggaatgaggcaagtcaaagatttcattcaaacactaattcaatacggtgggtacaatgaaatggctgatatattagtgaatttaacatcattagccactgaaatgggtcgattagtttccgagggttacgttttaactgtattagcacccaacgatgaagccatggctaagttaaccactgatcaattaagcgaacccggtgcaccggaacaaatcatttattatcacataatcccggagtaccaaaccgaagaaagtatgtacaatacggtgagaagattcgggaaagtatcgtacgatacattgaggttaccacncaaagtatcagctc

SEQ ID NO: 17342 - DNA, 656 bp, Gossypium hirsutum
  unsure (1)..(656): unsure at all n locations; Clone ID: LIB3830-001-Q1-K6-H12
ngctgtgcctgttggtcgtgttgagcctggtgtccttaagcctggtatggtagtgacctttggcccctctggtctgaccactgaagttaagtctgttgagatgcaccatgaagccctctctgaggctctccctggtgacaatgttggattcaatgtcaagaacgttgctgttaaggatctcaagcgtggtttcgttgtttcaaactctaaggatgatcctgcaaaggaggctgccagcttcacctctcaggtcatcatcatgaaccaccctgggcagattggaaacggatatgccccagtccttgactgccatacctcccacattgctgtgaaattttccgaattgctgaccaagatcgacaggcgatctggaaaggagcttgagaaggagcccaagttcttgaagaatggtgatgcagggatgataaagatggttcccaccaagcctatggttgtggagactttctctgagtacccaccacttggacggtttgctgtcagggacatgcgtcagactgtggctgttggtgtcatcaagagcgttgagaagaagacccacgggtgctaaggtcaccaaatctgctgccaagaagaaagagattgcatttgatagtatcagagccttttgattntggttatctttgtagtttggtact

SEQ ID NO: 17343 - DNA, 639 bp, Gossypium hirsutum
  unsure (1)..(639): unsure at all n locations; Clone ID: LIB3830-001-Q1-K6-H2
ctttcaaccgcgcctaataaccgctcggntttttctcagagtgaaaaaaaggggctgtctttcaccaagctattcagccggctatttgccaaaaaggagatgcgtatactgatggttgggcttgatgctgctggtaaaaccaccattctttacaagctgaagttgggagagattgtcactaccattcccaccatcggtttcaatgttgagaccgttgaatacaagaacatcagcttcactgtttgggatgttggtggccaggacaagatccgaccattgtggagacactatttccaaaacatgcaaggacttattttcgtggttgatagcaatgatcgtgaccgtgtggttgaagctagagatgagttgcacaggatgttgaatgaggatgagttgagggatgctgtgcttctagtatttgcaaacaagcaagatcttccaaatgctatgaatgctgctgagattaccgacaagcttggccttcattctctccgccagcgtcactggtatatccagagtacatgcgccacatctggtgaaggactgtacgagggactggactggctctcaaacaacattgcaaacaaggcatagatggcgtaattgacttgtcagtctcagaaaagccagccccttttg

SEQ ID NO: 17344 - DNA, 628 bp, Gossypium hirsutum
  Clone ID: LIB3830-001-Q1-K6-H3
gttggattcgataaagaagacaggtttgtttgaaaggaggttaagaacacccatgggaggtggagtcagttcattgaatatgcaattgaggaaagaactggatctatacgcttcattggtcaactgttgtaacttacccggattgccgacccgccatgaaaacgtggatatcgtcgtaattagagagaacactgaaggggaatactcgggtcttgaacatgaggtggtgcctggtgttgttgaaagccttaaggttataacgaagttttgttctgagcggattgcgaaatatgctttcgagtatgcttatttgaacaaccgaaagaaggttactgctgttcataaggccaacattatgaaacttgctgatggattgttcttagagtcttgccgtgaagttgcaactaagtatccaagtatcaagtataatgaaatcattgtggacaattgttgtatgcaactcgtttcgaagcccgagcaattcgatgtcatggttacccctaatctttatggaaatctggttgcaaatacagcggccggtattgctggaggcaccggtgtcatgcctggaggcaatgtgggagctgatatgccgtgttcgagcaagtgcttcagcgggaaagttgga

SEQ ID NO: 17345 - DNA, 591 bp, Gossypium hirsutum
  unsure (1)..(591): unsure at all n locations; Clone ID: LIB3830-001-Q1-K6-H4
cggtcgcgtgggcggccgcgtggngaaaaagtagcgttcttttctcaacagaaggaaaaagatggagtcaaattcatggaggtttcgattttccaattcttcttcgtcttcctcaaggcgtcatcaatctcgatctgatccgtttctgggtggaggatatgaagaatttgatggagacgaggatttcaaggcggagtttttatgtccgttttgcgctgaggatttcgatattgttgggctttgttgtcacatcgatgaggaacatcctgttgaagtaaaaaatggggtttgcccggtttgcgcgaagagggtcgggatggatatagttagccacattaccatgcagcatgggaattttcttaaggtgcagcgcaagcgaagattacgcaaaggtggatccaatttgacattttctatgttgagaaaagaactgagagatggaaacttgcatgcccttcttgggggatcttcatgcattgtttctccccccaatgttgaagccgatccattattgtcatcatttatgttcaatccacccacagccgatgagcctttaagcttgcagtctctctctattgctgaatcaagtgc

SEQ ID NO: 17346 - DNA, 551 bp, Gossypium hirsutum
  Clone ID: LIB3830-001-Q1-K6-H5
cgttgctccagattggtcagaggccaaatgaacttcaagaggcttacattgacagatatcacaatcgacattccccgtgttccaaagaagaagacattgattgaagctatggagaaggccgatgttaagaacaagtgggagaatagctcatggggtagaaagttgattgttcagaagagaagagcatctctcaacgactttgatcggttcaagcttatgttagctaagatcaagagggctggggttgtcaggcaagaactcgcgaaattgaaaaaggagaaatcatcttgaaatgatacctgaatcacgaggatttgctagttttgtcattcaacattctgcaatgtgttctttcggaatgtttttttttttgtttgtttcaattaagatcagttgagtgcagtttcattggtctaagacagattttgtagtgaatttattgctagatttttttttgtgaaaacttgtggtaatttatattggctgcatgagaggcataataatagtctctataagaacagcggtgtatttgtccttcctctgatggccac

SEQ ID NO: 17347 - DNA, 622 bp, Gossypium hirsutum
  unsure (1)..(622): unsure at all n locations; Clone ID: LIB3830-001-Q1-K6-H6
ctttcgcgtgggtttttagttccgcaaagaaacgaaaaaatagaagaaatcaatcgttttctttttgaagtcgggttttagtttttggggagaaaaaatgttgggagtatttagcagtgcgatagtgtctccgccggacgagctggtggcggccggttgccgaactccatcacctaagataacggctttttctttggtgaaacggttccttgagacgaactcctccggcgtgtccatgcagatcggagaccatgtccaattcgcttattctcaccataaagagtctcctttacggcccagatcatttgctgtgaaagatgaaatcttctgcttgtttgagggagcccttgataacttggggagtttaaagcagcaatatggtctggcaaagtcggcaaatgaagtgattttggtcattgaagcttacaaggcccttcgtgaccgagcaccttatcctccaaaccatgtggttggccatctaattgggagctttgctttcattgtctttgacaaatccacctccactttgtttgtggcttctgatcaatttggtaaggttcctctctattgnggaatcaccgccgacgnatatgtggcctttgctgataatgctgaattgctg

SEQ ID NO: 17348 - DNA, 630 bp, Gossypium hirsutum
  unsure (1)..(630): unsure at all n locations; Clone ID: LIB3830-001-Q1-K6-H7
tttttaaaanaccttgnaaaaaanaggcaggganntgaaaatgtgaaaacccctgatgttcatacttttttgcagcatttggttacgtttgggattgttaagaaagaggatctggagttttataggaaacttgtcgttgcttctgcttggagaaaacaaatgcccaaactcgccgtttcgcttggcctcggcgatcattttctttacatgattgaagaattgatcagcaagggacagcagcttgatgcagttcattttacttatgaagttggccttgtggacaagttcccccctgtgcccctgctgaaatctttcttgagggatgcaaagaaggctgcatcttctattttagatgatcccaataatactggccgggctgcgcaacttgctgcacgcaaagagcaatcagcacttcgggctgtcatcaagtgcattgaagagtacaaactcgaggctgagtttccacctgaaaacctcaagaaacgccttgagcagctagagaagaccaagactgagaagagaaaaccagttgtagtccctgctaacaagcgaacgcgtgtaaataatggtggtccgatgcctcctgctaaagctggccgtttgacgaatgcatatgtctcatctttcccg

SEQ ID NO: 17349 - DNA, 643 bp, Gossypium hirsutum
  unsure (1)..(643): unsure at all n locations; Clone ID: LIB3830-001-Q1-K6-H8
taaaaactgtccattgtttttgattttctctcacagatccatccttccgtcccttgngaaatacaaaggacttctctgctattctcaatttttatcctaaacgcttaaaaaaaaaaaaaccactaaaaagatggcgaggagaccggacgaggaatacgattacttgtttaaggtagtgctaatcggcgattctggtgttggaaaatctaatttgctttctcgatttactcggaacgagttttgcttagaatctaaatctaccatcggcgtcgaattcgccacccgcactctccaagttgaagggaggactgtgaaagctcagatatgggacactgctggtcaggaacggtacagagcaataaccagtgcttactatagaggtgctcttggagctcttctggtgtacgatgttaccaagccaacgacttttgaaaatgtgagccgatggctgaaagaactcagggaccatgcagattctaacattgtaattatgatgattgggaacaagactgatctgaagcatctccgagcagttgccacagaggatggtcaaagctatgccgagaaagaagcctttcatttattcagacatctgcactagaagcaataaatgttgagaaggctttccagaccattctgtctg

SEQ ID NO: 17350 - DNA, 653 bp, Gossypium hirsutum
  unsure (1)..(653): unsure at all n locations; Clone ID: LIB3830-001-Q1-K6-H9
gtttcaganaaaatgttgaggagacctttggagaaggcaaagcaatactcaacttcaattctaaccctgtactttctccctgcacttccttctctaccgttacttccgctgccgctacaccattccacaatgcgccacgtcagcttccaccgttcgattaccagccgaaaccgtacaacggaccgtcggccgatcaaatccttgagaagcggaagaagttcttgggcccctctctcttctactactaccaaaagcctttgaatattgttgaaggaaaaatgcaatatttgtatgatgaaaacgggaggagatatttggatgcatttgctggaatcgtaacggtgtcgtgtggtcattgccatccggaggttttgaatgcaataacagagcaaaataagctactccagcacgctaccactatttatctccatcatgcaattgctgattttgctgaagctttagcttccaaaatgcctggaaatctcaaggttgtatatttcgtgaattctgggagtgaggcaaatgagttagcaatgctgatggccagactatactctggtaatcttggtatgatttcccttgaaaatgcttatcatggtgggaagttctagtactattggactcactgcgctgaaccatgggaagtacccaat

SEQ ID NO: 17351 - DNA, 552 bp, Gossypium hirsutum
  unsure (1)..(552): unsure at all n locations; Clone ID: LIB3830-001-Q1-N6-A1
ttttttttttttttttttttttttttttttttttttttttttttttttttttttttttttttttttttttttttttttttttttttttttttttttttttttttttttttttttttttttttttttttttttttttttttttttaaaagagcgcccccttcaaataaaataaaagggggggggttaaaaaaaatttttaaagggaaaaaaaaaaccccccccctgggggggtaaaaaatngaaaggggggaaaaaaaataagggggaaaaaaggaaaaaaaattttttcctttaaaaaaaaagggatttccccaataaaaaaaaaaaaagggggaaaaaaaaaagtttaaaaaaaaaccaattaaggcccgggctattttgggatgggaaaaattttaaaaaaaaaggttttttttttaaaaaaaaaaaaatttttttttagggggggtttttaaaaaggggtaaaattttttaaaaaaaaattaaaaaagggtttttaaaaatcgtaatttttttttggggaaacaaaaaggggtttttaagggggggttt

SEQ ID NO: 17352 - DNA, 486 bp, Gossypium hirsutum
  unsure (1)..(486): unsure at all n locations; Clone ID: LIB3830-001-Q1-N6-A10
gtaaaccagctcttatattcctccgggaacatgaacaatttacacgtaaaaaagagcacatgtaaaaagtgtaaaactccactgccttacagttataggtagcattttgtatgaaagagggatttctaggcataaagcacttggcaactcaagggtagaattcgtggaaagccattggggcagcgaccacctcccnattngctctgaccttccgttttgtccntngattggtgtccctattgccacatttagcccacttaacaaaaaataaatactcccttccactccactcacagcgaatggcctctgcattgcctcacgtggaaatttatcaccacctacgtactgccacgcgtcacgatcaggaacatataccttcatcgggcaatcaccgtattctgaaatgacaaacagcctgtcgcccacaaccacactcaccccggtccaaccttctttcatcccgtccttcatttcctgccacgtgtc

SEQ ID NO: 17353 - DNA, 559 bp, Gossypium hirsutum
  unsure (1)..(559): unsure at all n locations; Clone ID: LIB3830-001-Q1-N6-A11
tttttttttgttttttttttttttttttttttttttttttttttttttttttttttttttttttttttttttttttttttttttttttttttttttttttttttttttttttttttttttttttttttgggggggaaaataaaaaagaggggggggattttaaataaaattcaaagggggggtaaaaaaaaagggggggggggttaaaaaaaccaacaacctttttttttaaaaaannnaaaaaaaaaaaatttnntttgggattgggggaaaaaaaaaaaaaagggaaagngggntcccttttgggaaaaaaaaaagggggggggaaaaaaacgagaaaaaaagggggggtgtggggggggggggaaaaaaaagggggggtcccccctggggggggggggagggggggaaattttggggttaaaaaaggggaggggggggggaaccggaaaaatgggggggggggttgggggggggaaaaatttttttataaggggggggataaaaagggggggaaaaaaggggagaaaagtgttccggggggaaaaaggtattgggg

SEQ ID NO: 17354 - DNA, 580 bp, Gossypium hirsutum
  Clone ID: LIB3830-001-Q1-N6-A12
cttcttctccttcgcctctttgtctttcttcttttctttctttccctcttctaattcttcagcttcttctaccttatccttcttcttcttttctttcttcttctctcttcatttctttcagttttgcttcatcaacttccttgactgcagtttttttcttttgcaacatgcccaatccagagatctctttctcttccacaataccccccccgggagacgattttgaaatttttgctttgctctcaacatctttctggaccttttttggaggtttactatctggttcgggagagggtttggcttcttcctttggttgtcggatgctaggttttggaattgttacagtttcagaaggcaccggtgtctcttgtacaaccagtggtttctcatcaggattcctgatccgaccatcccgacttaattgccgctgatccagggatggcagaattcttttctcataatcgtccctgacagctttcttgctactccacagagccataaacttctcggcctcgacagtcgaaagctcctcaagagcctttatatctttctttgcagctagctctttggctttgtttaa

SEQ ID NO: 17355 - DNA, 600 bp, Gossypium hirsutum
  Clone ID: LIB3830-001-Q1-N6-A2
ataattaatagtagaagagtataatgatcaagcaatgttaaattaacaatacatgcaatatcattaaagtaaaatacataacataacataaatcaagccaagtgatgttaacattagatacaacatttaaaattaatttcactacaacatacactttttctataaactataaccatttagaatttctatgtatgcaaagagattcaccatcagtgcatggaggaatgcacacacacatttcccaatcaccatcttttttattaactatatattacgatataccatgaaattactgcatgatgatggcacatgcaccagtgtcatatgattcaaggcttagtggccgagccaggctgagtaaacatggacttcgaccattcaggcattttagcccactcaaggtactctgcctttttctcaggtttcttctcctcttctttttcatgctttgggaactcatgtttatgttcgttaccctcatcttgctttttcttgtattcgggtatttccggatattcgacttcgtgtttctcgtgctctttaggcttttccaatttagggaactcgggtttttctttctcgtactcttcgtgctctttc

SEQ ID NO: 17356 - DNA, 619 bp, Gossypium hirsutum
  Clone ID: LIB3830-001-Q1-N6-A3
ggatgaaattcaactttattattcattaacaaagattttagaacgttacacaaagaattgatggcaaccctgtatgaaagtagcatttttagtacaatattgagggtttatacagccttaaccctattaaaccctgttacttattttacaagctattaaattaactatgaaatcgcaacaaattaaagccctgaagtgaaaggcacacccccgctcggcaaccaagaattcccagccagaaagttaccgacggtgaactttgacacctcgcttgcgctcttaagaacatggtagcctccccatttgactctattagaagtggatgaaccggggccagtgttcatatactccgcataatacagcgtcttaagtgcaaaattaccatcccattccatccagccggccgggttaatcaagctatccagatacgttttcatgaaaaccgtcctcgaatattgtttccatggcctccctagatatgttttcaccgagctttgcactggcttcaaatcggaagctgctgtaactctggagttgtggattataattccagtgttctggtttgggtcggtccggccttgagccgtcaccgtgttggtcttattagggggattgcgtg

SEQ ID NO: 17357 - DNA, 587 bp, Gossypium hirsutum
  unsure (1)..(587): unsure at all n locations; Clone ID: LIB3830-001-Q1-N6-A4
cttcttcttcttcttcttcttcttcttcttctgcatgttgtttgcataaccttgtggtattaagtatgatgttgggataggctattttcatcctttagttttgacacttaaattttcaggctgagcagcttcttaaagatgagaatataattgctgnttatgagatactggatcatttctgtgaatttgtcaacattcaattatcatctcttcgcagacacaagtattttttttccctcttaacaacacttttcctcttttaatcacttttttcaagtttctgaccatgaactgaattggttgtcctgtaattgtggtattttagggactgccctaatgatatcaatgaatcagtttcaagcctcatattcgcctctgccagatgtgcagatctccctgagcttcctgcgattcgtaagctcttcggggagcgttacgggcataggttcacgacagtggccgttgaattgcttcctgggaatctggtcaaccgtgaggttgcccattctagtgctaactgctgatttttcttgcttgtgatcagttttttttttaatcatcaattaacatgaagaattttgataaaa

SEQ ID NO: 17358 - DNA, 604 bp, Gossypium hirsutum
  Clone ID: LIB3830-001-Q1-N6-A5
aaaagtaaaaaaagaaaaatttcatttcttttcacagaagctaggaattaccaaacttcccccacccaaattatcattagctaattaattagtctcatagttgtaagaaaaggggtcattacgcaacatgaaagtcatcttcacactgcattgttcttgtttacataatttagatcaacaactcactaccctattattacaagttacaccccccttcccacattgtttcattgtcaataccctaaacctacacatacatacacattcgcgcatatgtatgtcaacttcttcctatcctcaacgaaggatcgatccctttattacttgatccagcaaagagcttagcaatttccaattgcgtattggctatgatctctgttcttttaagctccatttccctccttttagtctcagcttcaatcctcattttctctatttcccttagtgtttccatccttgattcttctgattttaatactacttcagctagtattcggatactctcccctatttctctatactcttcctttttcctccttttcttcttcttattctacattgttttcatcttcaatttcttcgatcttagcttttccttgtcact

SEQ ID NO: 17359 - DNA, 553 bp, Gossypium hirsutum
  Clone ID: LIB3830-001-Q1-N6-A6
tttttttttttttttttttttttttttttttttttttttttttttttttttttttttttttttttttttttttttttttttttttttttttttttttttttttttggaaaaaaaaaaaaacaaaaaccaaataaaaacattggggggaaaaacaaggcctttttattttaaaaaaaaccaaaaaaaagcaaaaagcccgggggggggggacccccccccctttttttttagaaaaccccaaggggccggggggcccccttttttttttttttataataaatttttttttttttttttttttaaaaaaatttttttaaattaaaaaaaaaaaccccaaaaccctaaaaaaacgcaaaggggggggaaccccccaaaaaaaaaaagggttgaaggggaccttttaaaaggaaaaaattttttttaccctttccaacggggaattttgccacattgtttaaaacgggaaaaaacccttgaaaaaaatttttccgggaaaaaacaaaaaaaaaaatttttttttgcttttaaaaaccaaaaattaaacttttttaag

SEQ ID NO: 17360 - DNA, 598 bp, Gossypium hirsutum
  unsure (1)..(598): unsure at all n locations; Clone ID: LIB3830-001-Q1-N6-A7
gattaataagtatctttgatcactgattataaaacaaagtagcaaatccaactttcagccatggttaaacataatagagcaacgacggaaatatttacaagcaacacaacactatctttacgtaatggaggctgagagagctagtgactttatgntttcaaccatctttatataaagttatacctaacacagtaatgggtgtcccccccaagaaaactgtcaccccattccatgataaggtatttttatgccgcctcggaaaagccaactctactctttaccgaaatcgaacacggtgtggtagcggcccatgaaaacatctcccaaaatccagaggggtccacgaggaggaggaacatccaaagcagtaaagccactgatgcactgagcttgaggaccttcacccaccttgagaatatactcttcaggggaaaggtcgaaaacttcgtcaccaatagtgaaggaaacagttggcatggacgatagacttccacattcaacagcagattctcccatcggactcggcatacggtcacatagctgattgacgtagttcaatatgatgtcttgagtctgattctgctttaattggttctgc

SEQ ID NO: 17361 - DNA, 601 bp, Gossypium hirsutum
  Clone ID: LIB3830-001-Q1-N6-A9
aacccaaatgcacaaatgttttcacatatatataaaatacaaattattaatgtataaaatataatacaaatataaaataccttaaaatacgattatgacataacaaaatacttgaaaaggacactactacatactactgggtctatataacattcacatgggctttttgaggtgagaaaacagaatatatatagtttcaaaagtacccaacaaacaaaggggaaaaacaaaaaccttattttcccttctttttttttctctcccataaactaaaaatgattttaaagaaagcattttcttgtcgccctttaaacaacagaaggccaccaaaaccattcaatcttcaaccagaacattcagattcatctaaaacaatacacattttgataaatcaagcatcacacaagtatctgcacctgaattatctttgccattgcgtttgaaggaaacgcgatctgcaacgtttgatgctgggggaaataggatcaggatctttgcacactgctgaatttcctctcaagaccctaatgcagctccgtgcatcgatggacagagtctgatgcagcaatgaaagcagagaacaaagagctggcatcaacga

SEQ ID NO: 17362 - DNA, 596 bp, Gossypium hirsutum
  Clone ID: LIB3830-001-Q1-N6-B1
caaatgtggttaagaatatttacatgggttacattctgataaagtatcaaggagatgaaaataaaagattcaaggtaaggtcgcagctgatgacctttacaactcatctgaaaattatcccaactaataaccgggccatgtaagggtacatgtgcctgtcaaaagactatatcagtttctcccactcattaatttgctacgaaacatgcaactacagcatctcacatttttgtcaatatctactaaaacaattatcatgaaagataacagagtggctgaatgaaccagcttgcctgcatcatgacacaaaatagatgaagtttttttaccactgctgcatcaaatttggatccttcatgaccactacaattgctaggtaagaatgcggtgataatattttggttgtgtccagcttccacaaatcaggcaaggaaattgttccattcacacttttggtgggaaagtaggcaagaaatctttagattttggcaggggaagctcccggaaccaatcatgattaagagcatcatctgctgttattcttttctcagggtcataggtaagaagcctgttcaacaggtcaaatccagcatcag

SEQ ID NO: 17363 - DNA, 440 bp, Gossypium hirsutum
  Clone ID: LIB3830-001-Q1-N6-B10
gggccacacctaggggcaaataaccacatgaatccattatacctggtgggcatttacaagttcccttaacaatttacttccaatacagacaacaaaaatatttagggtaactcaaacacaaataaaacatgaaaaagcataacatacaggaaaccactttcaggctttaacaaggttaaaaaaataaaagcttgcataacacgggagcaacaagaaaaaaaaaaattattctcccactcaatcacagggactttttagtactcataattttcacccttataacccttagccgacttaacaccaacttttttataatccttttccaatgcagcaagatcctcacgagcctttgaaaattcttcttttttcataccctcaccaacataccagtgaatgaaggcacgtttggcatacataaaaacaaacttatggtcaatgcg

SEQ ID NO: 17364 - DNA, 480 bp, Gossypium hirsutum
  Clone ID: LIB3830-001-Q1-N6-B11
aaacaaaaaaaaaaaaaatgggggaagggaatttttttttaaaaacaaaggggaaaccaaaaggttatttaaaaaaaaaaaaacccccccccctaaattaaaaaaattttgggggacaaaaaaaaaaaatttaagccaaaaaaaaaaaaaaattttaaaaggttttttaaagggaaaaatggggaaagggggggaaatttttaacccgggattttttttaaaagggggagggggggttttttggagggaacccaccgagggggggggcgcaaaagggggggggccagggaaacctcttggttttaaaaaaaatttggggaaaaaaataaaaaatttggggcccccccgagagggggggggggcccctaaataacaaaaaaaaaaaaaagggcccctttgtgcaccggggtgggagggggccctctcccccaaaaaaacccactttgaaaaaaaaaacaaaaaaaaaaaaggttttgaaaa

SEQ ID NO: 17365 - DNA, 480 bp, Gossypium hirsutum
  Clone ID: LIB3830-001-Q1-N6-B12
gagaaaaaaaaaacttggtacagctttctttcctgcattatattagtctctttagatttatttcatacattaaaatgctgtaacagcttcaccaaccaagctttaaaaacactttttctttaacaaagggcaatatatgtttacaaatggatttttagaccgagtcccccctaaatctttggcggatcaaatgttgagccccttcaaccagtcttttcactacttctccagcaggaagaatctccttgattaggccaacactttggcctgcatagagggccatgttttcgatctctcctgttgttgttggattgggatctgaagcaaaaaagcgttggatttcggtttccatgccatgtattagtgatcgaccgatggcaggctgattactttcattttcatgagcaggaagggatttccagtcacagaccaacggtgttcgcaggacacgctgtggtgcaccgggccagagtgctctgc

SEQ ID NO: 17366 - DNA, 495 bp, Gossypium hirsutum
  Clone ID: LIB3830-001-Q1-N6-B2
aaattcttaatatgaaatttattccaatggaacaatcaacaacattaaccacaaatttaaacttaattaacatcaatcatccttacaagttattcaacaattccacaaataaaaattttttaaacaaaaaaaattcaataatttacaacccaaaaaacacaattaattaaatttattcctataaattaacaaaaaaaatttttttttctttcattgaaaaaaaggtttaaatgtgctcaccacctttttaactttatcaacgagagaagtgcatgaaactgttccgtcattcccggccaatactctgtatttatctttccttggaaaatttgggcattcaaaccctaacgtagcggccaaaattctttgcacgtaattagcgacgtcatgcgggcttttacctgacgaacatgtagcttccgctggcaactggttcaaaaatgtcacttctctcgttgataaagttaagaaggtggggagcacatttaaaccttt

SEQ ID NO: 17367 - DNA, 579 bp, Gossypium hirsutum
  unsure (1)..(579): unsure at all n locations; Clone ID: LIB3830-001-Q1-N6-B3
gcaaactagtatctgtatcatgtatattataaacggtcggcgacatattgcgaaagatttatacaaaataaggttgaagtccaaagtaacagaaatgagttgtcattttgatcatctaaaaacaactttaaacaactttagaattataaggtnnnnataattaactcaatactcgttaccggaaaggcaaatgaatcaatgttgctcccccccgtaacaccgtcatcctaaccagaatttcgcataaggaaagccactatgaatcccactaaggcacctgcaacaacctggagtggagtatgtccaagtaattcacgcaggggcctcacgctagacaatgggtgttcaggagggaactcacacacaatttgattcagcaattcagcttgacgcccagcgtgaagtcggacaccagatgcatcatacatcacctgcatggattggaaactcgttgaccaaactccacacatgaataactaataagcatgtaaattattttttcattgagaactaatttcaagttaacaattggaagttcagagaattaaaaaaaattgagcatcaatgtcaatgcagtac

SEQ ID NO: 17368 - DNA, 593 bp, Gossypium hirsutum
  Clone ID: LIB3830-001-Q1-N6-B5
caaacaacaatgctggaaaatctgattgatagaattggtatataacgttacattttttaaatgaaaaaaaaatccaatttcacactcaaatttcaacaccaaaaccataataaaaaattcatcaaaatggaaaacctttatccctcgtctcaaattgttcatttccagatcttgatacggagatcaaccttacatttggcgccggacaccccgcccgccgccggcgacttacctttcgggacaacccctttaatcccatcgcacgtaactctaatcccaactttcttgctcttcaacccacccattttcgctgtcactttagtatccatctcaactttcaacgacactccattccctttcttcagttccggtctcaagttgttcaccgtctccgcgtccaaatccgaagacgacgccaccgtaacccccctgaaagtcgactcgtccttgccgtcactgacgaatgccggcaacgttccgttccctatcagaacgtcgccattgctggtcacacatgaaatgacgaatgggtcgtacgagaaggagagatgagagttggggtttttggaagaaaggttaagttgaaaaggttg

SEQ ID NO: 17369 - DNA, 413 bp, Gossypium hirsutum
  Clone ID: LIB3830-001-Q1-N6-B6
aggtggattaattataaaatacaatcataacattgttacagtccgaagtagtgcaaaacaatacatacaagctttgaaatcatttctgaaagatgcttcacaaagtatgagaatgtacaacatgagacactaaaccaagggaatacagaagcatggctacacctttccagtgttaatgtctgctgtacaacatttttttagtacgacaagcaatcttttttttaactgtaatccaaataacactccaaacctcgatgcacaaatcctgaagaagcagttaacatcgggttctcacataggagcttcaaagtcaccactgacatcgatttcagattctaaatctgcctccacatcatcaggatcggatgaaccggcagcagcttgctcaccaactttggctccttcggctgttg

SEQ ID NO: 17370 - DNA, 499 bp, Gossypium hirsutum
  Clone ID: LIB3830-001-Q1-N6-B7
gaatactaaattacaaaattttatgtgagaaaaaatatggtaatgccccctaaagacgaatacaatgggggggttagccaattctacctttcacttatactctgcattggggttcggtgaaccctttatctcattttaaacacagacaatgaggtgatttcccgcgtcccaccttgttatattggttttaccaacacagttccactgccaatcatttaaactaaagacccaaaaatgcttatttacatgcttttcatgctcaacccgtatatatataccccacaatttggacttaaacaacattggcattggtttgagctatcccctgagctttttttaagtccttcaaaaaccttttaaaattgaaaactgctgttccaccaattttaaaacgaattccagaattgctgggatttagctgagcaacaaagcgcgattcctcataagttgttccaccaatgatgaatataaccacctcctgtggcctgccctgctgaaa

SEQ ID NO: 17371 - DNA, 615 bp, Gossypium hirsutum
  unsure (1)..(615): unsure at all n locations; Clone ID: LIB3830-001-Q1-N6-B8
atataaccctagnaagaaaacaanaaccatcaatggggaaagttggtaatgttgcttgatcaataggttaccttctccatgtttcatctcaaggctcaaacaccatactctctgcttcccgtttcacggactcgaacagcacggaagacaattancgtcncctaaactggggaagaccacaacaatgagtttcccggnattttcccgccttccggctatctcaatngnggcagcggcggcagcaccagatgatatacctaccaacaatccttctttcagagcaagttgttttgcagtttcaatagctacttcacttgatatttgaacaacttcatcgattaaattgacatctaaaaccccagggatgaagccagcaccaattccttggatcttatgtggaccaggtttccctccagaaagcactgcactctcaactggttccacaccgacgagcttaatgtcaggattctgctctttcagatacttcccggctcctgttacagtacctccagtcccgataccagagacaaggacatctacctttcctccactgcctttccatatctctggtccggttgtcagataatggatctttgggttggcagggttttcaac

SEQ ID NO: 17372 - DNA, 354 bp, Gossypium hirsutum
  Clone ID: LIB3830-001-Q1-N6-B9
ctggattgtgtactaccatttacaagggaattaatgtacataaatatgcattagttttgccaaacaaggctgtgacgcagaaacaaaacgagacagcaacaatggagtgttgatggacacgaatctgttcaccaaaaccctccaaactggacattatttttctgcctccacagtagggcaaaacttgaatttctgtctcctatggatcaaatgctttgcagcatacctgcatcacaagttcatgcaactacgcttttttacagattcctttcataaggttcaagccatggaaatcccagaaaatcaaacacctccttctctgtctccaatttcagactcgcgatctagaactag

SEQ ID NO: 17373 - DNA, 535 bp, Gossypium hirsutum
  unsure (1)..(535): unsure at all n locations; Clone ID: LIB3830-001-Q1-N6-C1
gacaccaactaaattaaattaaacatgttgcatttacaaatgtttgccataaagtttaaattgcttttatatggctcaattcacgcagcatacatacttcatagaatttgatggtaaaatcccaggaaagaaaggggggggggtgggggagtttttttttttttgacatagcacttaagacatactaggttatttatttgtntacaacgcctgtgcttgtgcatgttcaggtttgtgactgaattcataatccagatgaacaaaggcacgctcaatctgtggcagtaactccaacttttcttgcaatgattccccaatgtcatgagcttnttgcaatgccatgtttgctgggagtacaatgtcaacttccacgaagtagtgagacccgaaggtgtaggctcggacagtatcgatatgtcttatggccttgtggtggttccaacacaggtatgttagtttctgaaggtattccggagctgctgattttccgactaatgaattcacgttttttagtaccgtnatagaccatgttcgn

SEQ ID NO: 17374 - DNA, 605 bp, Gossypium hirsutum
  unsure (1)..(605): unsure at all n locations; Clone ID: LIB3830-001-Q1-N6-C10
aaagtaaaatacataacataaacttcattaaaacataaatcaagccaagtgatgttaacattagatacaacattcaaaattaatttcactagaacatacaatataacataaactatatccattcagaatctctatgcaaagagattcaccattggngtttggaggaatgcgcacacacagttcccgctcaccatcttttttattacctacatccttactatatatcatgaaattactgcatgatgatggcacatgcaccagtgtcatatggaacaaggcttagtgaccgagccagattgaataaacatggacttcggccattcaggcattttagcccactcagggtactcggcctttttctcgggttttttctccacttctttttcatgctttgggaactcatgtttatgttccttaccctcatcttgtttttctttgtactcgtgtattttcggatattcaacttcgtgtttctcgtgctctttagatttttcccatttagggaactcgggtttttctttctcgtactcttcgtgctccttcgattcgtatgactcgtggtactcttcatgtttatgtttcttatcctcatcttgtttttcctt

SEQ ID NO: 17375 - DNA, 586 bp, Gossypium hirsutum
  unsure (1)..(586): unsure at all n locations; Clone ID: LIB3830-001-Q1-N6-C11
aatgaacaaaataggaagacatttacacaaactttagaaacaaagagttttcagaataacaaaacagttcctttttccacattacacacagtttcatcccagattcatttttaaccaaaataaaaaaccaaaatcccaattaactaattaaaaatanataaattaaaataaatccccaaagattctaaatttataaaaataattttcccactaccgaagaaaacaaaatccaaccccattgatcatttcaaagcttcaatcagaataaggcttggacttggaccggtaaaggaatttcttcttctttgatgtttgattatcaatggtgagaacaacctttccaggctcaccggtcttgaagctatcggagatcacggtttcatcagccgaagaaacttttcttgttttcgattccatcacagtatacccatgttcggaggtcggtacgaattcggcttcataattgacttcccataccactactcggagtttccaaaccagattacaatggtcagttatagggaattcaacactatgcttcgatgctggcttgattgcaacctctgtgacggtataggccacgcta

SEQ ID NO: 17376 - DNA, 621 bp, Gossypium hirsutum
  Clone ID: LIB3830-001-Q1-N6-C12
attgaaccatcatattttaatattaattaatccatcaatttcagcatctcatattttaacagccacaccatgagtcttaaggatctggttaactatgagttgattgtctcaccaacagatagctaataaaaacaaggttttttttcaaggtttatcaccatttctatagattgctgaccatactattattatccccccagcttattcctcttcttctgcttcttccagccaattcacaaatggctccagggccttcacaaaggtttgcctgcccttcgggttggttcctttgcggaaccaatgaaaaatggtatcttctgcaaggacatcctgatcatagagagatctcacaatctcgggaaacagcttcatcaattttgcatcctcatagcattgcatctgaactttatatataagttccagctcaatgtttccactggtgcagaaagaattaacagctttgcccatgttttgacctgtcgcaaagctgaattggcattctgctgctggttctttccagaccactgaacagcatccattattacattccacagaatccttataacctcaatatcaggtaatttagcatctttaacacgttgtttgacagtttcaatgact

SEQ ID NO: 17377 - DNA, 562 bp, Gossypium hirsutum
  Clone ID: LIB3830-001-Q1-N6-C2
gcaaaccaaaaaatttttcatatcataaaatgatgtgcttactcaccatgaatatcaacacattaaatataagaatatataattgcaaaaaaaaaaatcaaagacaaactaaaaaggattttaagataaaaacatttttttttcctggtccaaactcttaaattatggatataacaaacatagccgcagctgtgtgtaaacttctatcattcacacaacagagttttggtgtatgttgaaaacccatagtgaaaatccgatagctatctttactactcccacgcgcttctttcccattcctccatcactcttctctgcagcactgcttgtggagttaccactcgcaggtggggatgtggaatgcttctctgtcagcttttgatatccttggaataacttagcttcctgggagttgggtgccaagtgcaaaagggagatgcattccgtaatgttaacagtgtcatgacaagtgtgagggagggttgcagcaagactagcattgatgttgaggccaagatggggtcatctctatctttaatcaacacacacaggcatttcttgc

SEQ ID NO: 17378 - DNA, 559 bp, Gossypium hirsutum
  unsure (1)..(559): unsure at all n locations; Clone ID: LIB3830-001-Q1-N6-C3
agcaagtcaacaaaattgattaaaaatgttaagtactattatttattattaatattacatcatcaaatcttaaaatctatttcgtcgaccaaaaaaaaagaggagcaagcaaccaggtcacccttgtttatttatggcgtcnntaagagcatggatctgagctcggccacgtcgatctcattgggacacccccccggtctgtagcatccggtaacagggtcgggaacccacgaaaccttctctttagctccgcgagacatctcttcccctgttttcttggccaccgtagcagcgctccttcccgctcctcctcttattccactcgacacaattccttgtgatgccgccgcatatcctcgtctggagataacgttagagattccatcgacaacaaaagtagagaaaagcttagcgttggagagagagcgagccatttctcttatcttaatattgatttgttcaattcaaattcaaactctggattgataaaaacttgagcgctgctgtaggaaagctttttttattttttttattgttgaagagcaaataaactttctac

SEQ ID NO: 17379 - DNA, 600 bp, Gossypium hirsutum
  unsure (1)..(600): unsure at all n locations; Clone ID: LIB3830-001-Q1-N6-C4
aattcaacttctagtagattacaaacacggcaaaatgaatacaaaagtaggggctaaagcaaactttttttcttgcttaatcctctcccaagttttttgttccatcattggcatgaataagaacaccaaaaacataccaacatatcataaccaaaccgtancttaaacattcggattttacatacactggcaaattgctttatgtaacacacaaggcaaccccccatgcaaaacctacatataataaacacagcaactcattacagctttgctatatttttttccccttattattaattatcgttataggcctcaacttctaatgggaactgccttccaaatgggttagataaaacatctacagttgcctggaaccaaaaacaaaagttagtggaatctccaaaatcagctgctttcaggttattcaaacgacacccattgttactgttttcctttctgcatcgctacaatggagatttcagcaacttctttagtgctattactatnttaccaaaagacggccgttgagcgggatcatcggcccaacaagattccatgagggaaaccaattgggggaggtgttcgngagaatggcaagct

SEQ ID NO: 17380 - DNA, 600 bp, Gossypium hirsutum
  unsure (1)..(600): unsure at all n locations; Clone ID: LIB3830-001-Q1-N6-C5
gtaaagtgatgactgaattgttgaatccaaagaaaactacttttatgaaggatacaaaagccactatggngaaaacaaaatgcatggctcattggttcgatggatacaatgcttcaagaacaatgacgggttggtgtaacatcgtttagaacgangtagnaaagnagtctcaccttgaaaactgtgttgataaagataacccagtcacacaccgtatcattcactcgattaagggacatcagcataaactgctgttccccctgattataccgagaaaatcttcctcacttttttcatactccgacggcaaatggggcaagttccatcagcctctgctattcttgttccacatgcaaagcaagccacacagtgcccacatggaaggaagaagcagtcccttggagcatcgaagcaaattgcacaaagtctccgggtattgttactgttttcaccatctcctattgatgtgccttcaagagaacccgctagaaaatcttcaagatctgcctcatcacttgaaacggaatcataagatgatcctcgacttgataaatcatcggctttgcgtgaaagcagagggctcttgcagaagcagctccc

SEQ ID NO: 17381 - DNA, 588 bp, Gossypium hirsutum
  unsure (1)..(588): unsure at all n locations; Clone ID: LIB3830-001-Q1-N6-C6
gtctgtccacgcaaaaccaaatgaagtatattatttctacaacatttcaagtacaaataaaaggatgcaccaagaaagaacctggtgtatgaaatcaaaatactgcactcttcttcagcgttaaaagtgggaaaataatataaatattattcaaatancatacaatggaataatcggaattcatttccaggctttcataacaacccagctcccgctatgattgcggccattaccagcatccaaggattacgtatcagctgttgactaccattagcattctccgatgctgatgctgatggcgataaggcagggcaagcgagcccttctttcccttcacggcactcactagcaaaaagaccaggagggtatttcccgtaaagattaatgtagctgaacatggttgaagcgcattcggtcgtcaagtcgttgatctgttctgcataaggacaagcaaattccttgaatgcagaacaacaactttcaggtggatactttggtcctttgcattggcttgtgataattgtgtagttcagaaactcaaagttaacagggcaagctttcttagcttgaaggagtgccttccagtag

SEQ ID NO: 17382 - DNA, 554 bp, Gossypium hirsutum
  unsure (1)..(554): unsure at all n locations; Clone ID: LIB3830-001-Q1-N6-C7
caaaaacaagcaatgatgcaaaatcttaaaaagagaaaggatgaagaaagtgcacaaaattcacaattacaattgagaagtaagagataacaaagaaaatttcaaaacaaaaataaatgaaatcaacaacacgaactcaaatttctanctttatacagaacataaattttttaaatgataattattgaaaaataaaccccactcgccatcttgatcaccaccatcaaaatcactgtcttcttcttttctccattttcatggtcacaaagaaagtgcaataactagagcagcaactccaaacaaaccaacattttgcaaggtggccgctttggagttatcagctggggtaacatcggggctatcagcaacagtggtagccttcttattcttcgactttgccggtgccggtgcgggagctggaggcctaggtgcaaatatttgcaatggttgaagaacttgatcgatttgataaacagcaagctgaccatcagtgtaaatagtgccggaaacactggtgtttgtcaaccctgttgttatattcacagagttccccg

SEQ ID NO: 17383 - DNA, 547 bp, Gossypium hirsutum
  unsure (1)..(547): unsure at all n locations; Clone ID: LIB3830-001-Q1-N6-C9
ggtaaggttacctgatccaattctgaaaaaccatcaccatatatacaacttcatatataggcggaagagaaacagagtccataacttctaggtacgtttatgtatataccaaaccattgatttaacaanataggttcgcaactttgtaatattggtgcttatgatatatcaagttntccgaacggtaaacctttcttttnaatntngtagattcaggttcttctatggctcatgttaaaaaaaaaacttcgtgttcaagaacacgcaggagtgtcgcttcagcttttgtgatgacatcatcggacgctttttctagctgtcgatcgacaatattccggagggaattacagtactctccgaagctttcattgccccatctttggcaagtttccttgagttctggaggggttttactgtcatcttctaagcagtgtgcgaaactctcctgatagatggtttcgatcgcccaaaaactacagccgcgacggtgtattcgacttctgggcttattaagctctcaaaaaacggcagtattcttgatttgctt

SEQ ID NO: 17384 - DNA, 622 bp, Gossypium hirsutum
  Clone ID: LIB3830-001-Q1-N6-D1
ggacataaacataatcagtaattgcttattgtcattttaactgaatcttacaaagtataaattagtggcagcagcagcaaacaagccctaacatgctttacaacattacttataaattccaacattcaaaactgggtaattatattatgctttccatggattatccttcaatttcacctgcgttatttattccaaccttgtgcatccccataccaatgaatggccagaccctggctgcttttaagaggtgggtgattacactcttatctgctcctcctttagccttaaaactgctggtccctgaccattgtttccaaaatccatcgctttaagtaaagaatggttctggttctcagccacaaccttgtgcggttttgtctgcgacaaactgttgttcaccatgttgtggctgctgtttctagctgctggaacgtcgtggttatgcttcccctcgtatgttgttatgactgcttttgggtcagttgatgctctttccacatgctttctaacattgcatccagcactcgtgcatttgtaatagctccttggatgagggttccctttcaccactttctgtccatatttgcgccatctatagccatcatccaaaagtcaacttcac

SEQ ID NO: 17385 - DNA, 575 bp, Gossypium hirsutum
  unsure (1)..(575): unsure at all n locations; Clone ID: LIB3830-001-Q1-N6-D10
aataaaaagaaatcaaattcataacaatgtaattctacaatttttggcgcagtgactaaaattacacaaagcagaaaataaactaatctacatgcttttcatccccccccccaaatctggtctaccccaagtttgtagcattggggtcnnnttcccccctaaatttcctcaacatgtaactaaaagaaaaatatcccgcattacaaaatttgagttgaacaatgatcacacggcttactcatcaatggcagacaataaaacataggaacaattcaatactcaaatgaaataaacaaagaatgatcaatctgagcgaataaagccgattttccttgttcagtttaatgcatctatatgtatgtgtttgagagtgttttttttaccttatatcgttgtataatgtttatatattgcctttttaactcgtttttgctctcttccatactataacaacgccatacaggtctgctgaagccaaaaagttctccccgtgattccaagctactactaaaaccggaaaacgatgaccctgtagcttatttacgcatgtatgtttcggccgagttaaatcatag

SEQ ID NO: 17386 - DNA, 613 bp, Gossypium hirsutum
  Clone ID: LIB3830-001-Q1-N6-D12
caaaatactaataatataaataaccacttattaaaaaatacatatagaatggatctagataaataggtgtccaaattcaattgtatctagataatattcaaataataaacataaaacagaatggaatgaagagggcaggcagtaaaaattttgccttttttttatgactgcggttgcctgctaaatagaatgcatgtattacaagatccaccttgtttctcaaatgattggataaatttttctcacacaattattttcttatcattacagcctaatctttccaacccagatcaccgcacaagagaaaaaggggttaaaacaacagaaacggttcagaaattctagtcgagaccaaaagcttaaagatgtcaatagccccagtagtcattccggatctcatcatcgaatttctttttaagctctggatgtttctcaaagtactcgtctgcggtcatggtgctgatcttttgcttaagttcttgaacctcggcaatttctttctccaatcgctcagactctttcaaggatttctcctctgcctctttcaattctacaagcaatgcatcaaattttggtttgtattgaggagtgacggtgtcaacaaaacttggga

SEQ ID NO: 17387 - DNA, 602 bp, Gossypium hirsutum
  Clone ID: LIB3830-001-Q1-N6-D2
aattgtcatttgcagatgcacactttgattacgtaaaaggaagtagtccttcaaattgacacttaccgaaagaattacatttatccaacaaatcaacaagcaaaggtcacagatgccatttcagtgctaacttgttgcctcacattgtcatttgtttttttttcatgtagagtgccactcttttgtgcaatgtcaccaaagggaggtaaaatctaaaatagtccctaattgtatattttaacaggcttctcaaaggtgtgccggttctgattagcagcataagctcttttcggagcattgtcagagtgctccagcccaagatactgctcccaagcaccataaacatctcgtctctgaaaacgactagatacaatatcagaatcttgaaggtactccggccggccaagtgagaggaatgcaaacttccacttagcaaagtcctcatcaggaacttgcagcttcttttgtattcggacttttatttcagccaaagtctcaccttcatgaatcaccaagaaaaaggctctccaaaattcagaatttgcatctggttctgagcagtttctttagtgaagtggtaaacatgaattaggcgatcattt

SEQ ID NO: 17388 - DNA, 596 bp, Gossypium hirsutum
  unsure (1)..(596): unsure at all n locations; Clone ID: LIB3830-001-Q1-N6-D4
cagaactcacatatattattattaacatcaagcagcgcgcagaagcaaaatcaacaaaaaattctggaaatacaaataatgtggataacaagaatatgttcaacgaccaatcagacccttatcgatccatttgaaaaacgaaaatttatagttaaaatagcttaccaacttcatatatatccgctcatgagagaaatcccatgcaagccaatgcaagcccaacaacgaatctcagccccatattccttccggctgagcctgaattatcagcagaagctggctcatctgcggttgctgatgctcttgagttcgatttagaccctgttgatgatttctttgtcgccggtgaaggtgcagccgctggggatttagcttcaaaaaactcttcaggcaacaacaccttgtccgcttgataaattgccagaggtttcttttgatataatgcgttgttaatctgagtctcgacaaccccgcttgagacgttaacctggttgttcaggccagtgacgttgaggccgaaatcctgaccagcttgggttctaacggggttgctaacaaatggnagatcttcaaggagtagtatttgggaataacgt

SEQ ID NO: 17389 - DNA, 572 bp, Gossypium hirsutum
  Clone ID: LIB3830-001-Q1-N6-D5
cttaacggcgccttttttttttaagaaagaccattaattcctataagtggcatcacaccaacacagatccaagggtgtcatgccataaaataaaaaaactctcgcattaaaattgaactcataaccaacaagctcaagtgacacagatcaaattttttttttatataattataaaagggcagatagaaaatatgcgcaaaacccccccattattgttcttagagcaccaccatttgcgagcatccatggccccaccctagctccaccctcagctttatcacccttcttacctttttcttcttcccaccacctttcttctttgctttgtcccaaaccaaccaggccttgatttcaggagcatctatcgtcttggttgactgcagttcttgcaggggatgggatgaatccgactgatccatttggcattagcatactgtaaatttgtatgagcaaatgatcaccaggcttctctacagaacaggtatggctgcaagagacgtgattacacattcaactaaacctagacagccttttttctttcaagcgcgagtatgaaggcaggaggggaatct

SEQ ID NO: 17390 - DNA, 599 bp, Gossypium hirsutum
  unsure (1)..(599): unsure at all n locations; Clone ID: LIB3830-001-Q1-N6-D6
aatgataattgaatatgataactctcattcttatataatcatcaacaacaataaccaaaaggacaagtgaagataaaatgaaaggaacaaccgaccatcattgtaaacattctatgccaacaattattttaagggaagaaggggcattnngtggnttaacttgaaaaccaaactgattacagcacttatgagcttagtgtgacgcctctgtaacagaaataggaaccagcaaccaggagtggggcagcgaactcgacgactgccgcatatttaggcgtcaggtcatccttgatcacgaatgcactcatctctttctttttgggctcctcggttgaaccaacctgttcattattctttgaagtgtgaccctggagaacaccaatctgatacttgaggagcaaattctgagctgacttgctatgtccgatatcgttgaattctttcgtcgcatccttccctgctgattccaacaacacctcttctcctcctggatgttcttccatgaactttgtcacgttcagaactcggccatcgatgacaagccaacagtcgttcttggatttgtgtcgagacattctgagaggtgtaaactgtgtgtc

SEQ ID NO: 17391 - DNA, 473 bp, Gossypium hirsutum
  Clone ID: LIB3830-001-Q1-N6-D8
aaagccaagggtcttcactcaagattatgtaaaggggttaaaattttacagactttgaccatttttttttatatataaccaggaatctttcggtaattaaaacgacccctctatccttttctccattggctgggaaggggccccccccccgggggaaaacataccattgaaactagaggcaggggcaggcttgaattcataaggaccttccttcactccccaaacctgatttccatcatcggcataacccctatcccagggatgtatctcattggtcttcaaaattgaaagttctgaaaggcaatatgttgctccattccatgaatttggaaatccacctgggggagttgaaccttcgtataaacagcgtttccccctttcacagcgtttggaatatatagttgtcaaatgttcaacaacatcatcaataacttcttcagggagggggcattgatcccttggccaaacacaaa

SEQ ID NO: 17392 - DNA, 552 bp, Gossypium hirsutum
  Clone ID: LIB3830-001-Q1-N6-D9
attgcaaaatgaggggccaatcaccttcatcatctgtattacacttcatttctttatatataactacatccttccctacatttttataggattaatcccttgaatttatgctcattaattaacttggatctatttggtaggaaaagagagatggggagactaaagccccttcagcccctctctttttttattattaacatcaagcagcgcgcagaagccaaatcaacaaaaaattctggaaatccaaattatgtggataacaagaatatgttcaacgaccaatcagacccttatcgatccatttgaaaaacgaaaatttatagtaaaaaatgcagaccaacttcatatatatccgctcatgaaaaaaatcccatgcaagccaatgcaagcccaacaacgaatctcagccccatattccttccggctgagcctgaattatcaacaaaagctggctcatctgcggttgctgatgctcttgagttcgatttagaccctgttgatgatttctttgtcgccggtgaaggtgcaaccgctggggatttagcttcaaaa

SEQ ID NO: 17393 - DNA, 557 bp, Gossypium hirsutum
  unsure (1)..(557): unsure at all n locations; Clone ID: LIB3830-001-Q1-N6-E10
aaaaaaacaatactaaggagttcatatcagattaatgaagtagcagtttgaggcttacttttgctacaaattatccggattcagaccaatacaaatggctgttaagaagcaaataccattgaaactaaagcacataaactatgaaggtgaactaatgagaggttcagatgatctagagaaactagaacattgaactgtagntttggcggcgtctgttattcttttacaaagaagatttggtttctcagaatcatcattctcgttcctgatctctttcaacattgctgttacatctttcatggtgggtcgttcttcgggacacggattgacacataagaaagccacccccagcacttgaagcatctcttggatttgtgtgcttgatcttatgaggagcatctggtcaataattgttgtgtaatctttcctcttttcacgaacgtcagtgttgatccaagttataatgtggacgccgtctggaatactcttgtctgttggttccatgcctgttaaaacttcaaggagaactacaccaaagctgtatacatcacttttct

SEQ ID NO: 17394 - DNA, 562 bp, Gossypium hirsutum
  unsure (1)..(562): unsure at all n locations; Clone ID: LIB3830-001-Q1-N6-E11
gaaacaaacagagattctgacactaagaatgcgagtttacttggttagaaacttcaaccaaaacacttatatgtgtaagcaacataaaactcattaccattacaacctatatactggtttttttaaaagaaaaaactccaacttcccaaattctttttttcaccttcacaaaatgttagcccacaattatttacccncccccccaacagcctacatgataagctgtaccaccatcaacacgttggaactcgatgtctaccttttacacttggacttcaaggaggtgaccgactgggaattgctgtgccaattgcgcttcctttggttgatgaaccagttgttgatttgctttagttgcaatccagtttcctccacaagtttggccttgtcatcttcagttgggtatggccactttgagtgttgttgccaccagttcttgagcactgtagtggtgtcacctggtaattttccagcccttcttttgcgtaatatttcctccctcacatcctcaatttttgatttgaaaccctgtttgagttcaatcttgagctcttgacgaacc

SEQ ID NO: 17395 - DNA, 603 bp, Gossypium hirsutum
  Clone ID: LIB3830-001-Q1-N6-E12
gtaaaataacatattaataaagttctaaaaacatgcccaaaagatataaaaacaaaatccagctacaaaacttatgtaatctgaacatcaagctaaagcagcaatcaaaaccaatcctacttaaataatgaataaccttttctgcaattttttcatttttcatgccattgttaaaatttccatacctcaccactcttatgaagcactacgcccggcagctgcagcagcgtacatgctaggacctggacttggtggtgttgcatagccataaccataaccgtagccgtaaccaccatagccttgccgtcgataataacctccattccactggtttccagaatcagctctccgctgtttgtttccaatacttcgaccccaagaaagtcggacagtctgcttgcctatggttgttccgttcaagctctggattgcttcctcagcgtccttcctgtttgcaaatagcacaaatccacatccttttccaggtggtattttcacagagatgatctcaccaaactgggaaaagggttgtctaagatcatcatcgctaacatccgagtcaagtccttcaacaaaaatggtagcattgtttgagtcattatg

SEQ ID NO: 17396 - DNA, 469 bp, Gossypium hirsutum
  Clone ID: LIB3830-001-Q1-N6-E2
agagaataagggggatctcacagagactaatctggtcgattttattaaaggtgattgatcaactggtaagaccggaaaatttattatttctaaaactgaaaacagaattaatggtttattaagtcctgaaattgcctaaaatagagtacttactggacaaaaacaacggggatgaaaaattattaagtcctttaatgaaaaccagggggaatgctttgttcatgcttaaaaaaatttttggaacaatcttcgtcttgacaaaaacaagcctatcaaaaatattcttgaaatatttacccccccaaatgcttgcttgcttaaaacttggcttgccaaaaaaattattgcttcccaaatcgaaaactctggaattaacaaacccttctcggggagatttcaaaacaaaaggacccatgtagctataaaggttgctcatccagcttatatacccttggaaaatattggtttc

SEQ ID NO: 17397 - DNA, 594 bp, Gossypium hirsutum
  Clone ID: LIB3830-001-Q1-N6-E3
gtgctaaacttctgccctcccaatgtgtcaatcctggtaaatagttgtgactataacagtgttaataatgtaaatgatatatgtaatattatacaaaagcagggcaagactgaccatataaaaagcacgtaatcacacctttctccgaactttttttgtttaatggagaaaggaaaaaacttcattgctgcactgccctatccaacgccctgaatatccttcaatgataaagcctctcaagtctcgagtgtttaagcttttccttcaatttcacgctttattcgaagggcggctctaacgacatttcctcttgtgatgatacccaccagcttgccctctacatcaacaaccggaagcctgcggtattttgtctcgagcaataatctagcagcatcctcgagattagttgtttcacgtacaactaatggagctggtgtcattaaatcaccaacgacctggccattcgtcttgttgagtaacttctgtacctcgttgaaagttttccaagtgctatcaacttcaggaaacaggtcattctcagtccgtcgcccagatatggagtccaatgctagcaagtcataatcagaaacagtc

SEQ ID NO: 17398 - DNA, 582 bp, Gossypium hirsutum
  unsure (1)..(582): unsure at all n locations; Clone ID: LIB3830-001-Q1-N6-E4
gatcaacaacatacattcattttatatggaagatataataagtccaaaacacacacagagaccaaagtttgacagtaaatgtaaagaatttgcattactttcttccaacatcgatcaggtcccttgtcctcagtctcatatcatactatcggttcnngtggcaatcttttgaagaagttttggggcattgaaggaatgctccttcgacaccgaggatgtctcatcccgaaaaacccgaatcctagtgcaaataagcgccaaggaaccaaatagaatgctatgcaagctattaaacaaaatgccataaacaatgaagtagctctgggatctctccagcttagcatagaattaagcctctcagcttgagttgccaagtctccgattatagtcatcatcctccccgcaatgcttctcagccgatcatactctttttaagaactttcacgttttttgaagttgggaatgtgtcgaactcctcatcgaaatcatcggactgcacggactcaacgagtgacaacttagtatccatgtgtggaggatgtcttggccttttcctgtactgtgaagctncatgtacaacac

SEQ ID NO: 17399 - DNA, 611 bp, Gossypium hirsutum
  unsure (1)..(611): unsure at all n locations; Clone ID: LIB3830-001-Q1-N6-E6
gattggaaacctggcataaaacactttcacataaaaacccaaactcgaaaacataaacaactgtcatccaaactccaaaacagtaccatatcntgaaatttcaaacaaaatttctagcttaaatgtgtgctttaacagtcattgatgtaataatanctccaaaacaactagtatcctattatgccttatcggccttggcagcccccgcagcagcttgtcctctgagcctaccagtcctccttgcagcaataagaccaaccttttgtccaggtggagcatcacgtctaactgtactagcatgaccaatgtgttgatggttaccacctccgtggggatgctcaactgggttcatagccacaccacgaaccttaggccagcagttcctcttcactctatacttgtggaaagcattaccagccttaagcagaggtttctcagtcctaccacctccagcaacctgcccaatcatggcacgacaaccacttggaacaatcttcttcgaaccagatggaagcttgatcctggtggtgtcgttatcagggttgtgactaataacaatagcgtaatcaccagaagccctagcgaaaaccccacgatcaccgacatgatgc

SEQ ID NO: 17400 - DNA, 591 bp, Gossypium hirsutum
  Clone ID: LIB3830-001-Q1-N6-E7
ccttccttctctttctcctcatcaacgatccgaaactgtcccttcttggtccttcttatcctcctcatcttcatggatcagaaatctccttctcggcggtctgctcaatccaaagggaaatcgggttgctgatgaatgcaggaggctttaaaatcaaattcttcaaacgtcgctcctcaaggtactcaagctgatcctgtctcaccccagagttgtctttgaacccctaccaaggttctccccggcagtgtccctggccacagtgaatgaaccacccgcttgggactcccacacatattgttcatcatcattatgctaggcggttacaataaccttctcagcaaccaagtttgctgcgtagaaaccaacaccaaatcgaccaatcatactaacgtcagcaccagcagccagtgcttccataaactccttagtaccagatcttgcgattgtaccaagattattcaccaaatcagccttaggcatgccaacaccactgtcaatgatggacagtgtgctgttagtcttgactggaataatgtggatgaagagctcaagttgagcatcgagctagctctagcctgttaagctctc

SEQ ID NO: 17401 - DNA, 573 bp, Gossypium hirsutum
  unsure (1)..(573): unsure at all n locations; Clone ID: LIB3830-001-Q1-N6-E8
attcccttctcaaaccaaacttgaataaaagctcataaccaactcaaatacaaaaacaactttgatcgaaaacccatttaaccaaatcacaccggttttcgactaattttaaatcgagttatgctcgctcctaagaaaactatgagaaaagtnnaatgnnttcaacatgaaaattatcctcaaattatttgaaaccctaagttcacccccactaaattactttgaaatacaagtaattgtagtaaaaaccaaactcattgcaccattttatccccttctttaagccgctattctaatagtattctcctaaaatgccatatcaaacgacctttttctccgttgccagttaaaattctagatcgaaaaaagaaagtacctagatttgaagtttatgagatggggaagatcgttaagagctgaaaactttggacagtttgttccagtcagcggtgctgagagcttcggatagtttgtcccagtcggcggtgccaatagcttcggatagtttgctccagtccgaggggtcgatgttgggagttacaacagcagcacctacagcaaatgcaacgacca

SEQ ID NO: 17402 - DNA, 576 bp, Gossypium hirsutum
  Clone ID: LIB3830-001-Q1-N6-E9
aagaacaaatgatactaagtttcacactcacaaatactgctttccaattggacacttagccacagttttacaaatatgataaaactactctcaaacatgaaagttgctccagatattactttgtgaaaatttcaaagatagatacataagaaaaaggggtaaactgctaaaaggcctcccaacttcatgaaatttaatatcattatcccttgaggaatccattgtgctctaaattaccgtttgtgggtacgattctcataaatgtagttcaagttcaccaaccttaaagaaagcctccaccagtccatgcggcatctgattttccattacgaccaacggcatttttatcagatgcaccattatagaaactatcatatccatcatccttggggtcatcccaaccagcccaaccatcattgctatgagaagcagtcacttttgtagtatgttccttcctattgtcttttgtgtcccaatcatcccaagaatttgagttataagaattataatttacaccagaggaggtttgtccaccagaagtagaattccatcccttattctcctgtttaaactcct

SEQ ID NO: 17403 - DNA, 395 bp, Gossypium hirsutum
  Clone ID: LIB3830-001-Q1-N6-F1
aaatgcataactctaatcacatagcaattaattataaagcatgaaagtcttgtatcagacggtattgaagttatcaaaacactctgtagaagtatagagtcataaccagcttcaaacgaagcaactgatttttttttttttataggccacgctacgatggtgttcaagggagaaaactctaataggcagttcacaaactcaggagacaaggttgtcacttaatgacaatgaagccagttgatcagcggcagcaccaccagtttgctgctgctgagccacagttctaagaacctccattgcttcagcaacctttgcttttagagcttctggtgactcgagcaaatgcaaaacctcggtctgatccatctccagaagcatccctgtaactttagctg

SEQ ID NO: 17404 - DNA, 593 bp, Gossypium hirsutum
  unsure (1)..(593): unsure at all n locations; Clone ID: LIB3830-001-Q1-N6-F10
agattcaaacaatagctttattaacatagatcaataataaccaaatgataaaacatccaaattaaaaaaagaaagcaaaacccattattctatcatcctaaacatatccaaatgccactctaaatgatacaaatcttttctctctttggttcttacttagcattatggtccaataccatgtgaatgaaaataaggaaaanataaccattcgataaggtttaaatccaagacatctcatcaaacattgttctttaggtaaacttgaagctatgattcatggcgcttgattaagttcactttgagcccatgcttcatgtacattgtcaaggcaagctttggtacaaccacatgaccttttaccacctccacccgataccgatacaagatcgaggccgccacgaacttcatttgataataagcaaaatctttccctaaacacagccgtggaccgccgttgaaggcggtgaatttgtaagccgattcgctcatgtaccggccgtctcgtagccatctctccggtttatattccctacagtcttttccccatatggcttccattctccccattgcatagattgcataaataacttttg

SEQ ID NO: 17405 - DNA, 616 bp, Gossypium hirsutum
  Clone ID: LIB3830-001-Q1-N6-F11
acattaagggtttaagatgccatcatgagagatggatatgttgttgcaaattcagtttcaggacgaagcccactcgaagtagtggcagcgggcacctcggttgacagtccagtttccacaaccaaagaacacacttccttgcttcagtccgggcttttttttctattcctttgctactcttcaccccacagaaacagtaagggtggtaatgcccataggggcatttgctgatcctttggcttgtgggggtgatgtggaaagaaggccatgttctcggggaccgggttccacatcaatggaccatcactagcctgccacatcagtgagttcgtgatcgcaaatttaaaacctttgcgcatcatgagggtaagtaagtgagcagtgtttttggcatcatcgaggccgcaatgggcacggccctgccaggctagaccggccatctcaactgcctccttcagattgcatctcatgccaccgaaaaccttacggaacggaacttttaagttaatccatcggttaaagtaaggaggtttacggatcttcttgaaccggcactcagattccagcataacccgacaatccagttcgaccatgtcaccacagcaaattagtgttc

SEQ ID NO: 17406 - DNA, 599 bp, Gossypium hirsutum
  unsure (1)..(599): unsure at all n locations; Clone ID: LIB3830-001-Q1-N6-F12
aatacgcngaaaatcttaaaaccactgcgatgcattaaaagagcaaaaattgcagacagattaatttcacagtcgactacggtttacatatattctactaagtaatgtttgtaatgtttccctttatccaagtttcagacttgaaaatgcatgttttcagttcctttggcttgtcatcagagggtaaaactaactcaaaaggcatgtccccgcggcttcaggctatctacaactaatctttgactgcactgtcttttgtgtccgattctgtactaggtttcttctacatcatcatcatcatcctcaattgttgcatcgggactaatatttaggctagatttcaccgagctgtagatgcgtgaagcaaaatccttgggatcgggtagattgaaaccactctccattagagccgtctggtaaataagctgagccgtttgcttcacaccctcatcctcagagtccttggcaactctctcacgaagctccttgacgattgggtgtcttgggttaatctctaggatcctcttgccgcgcatgtaagcttgcttgctagaatcagatagggtttgagactgcatgattttctncatattagcact

SEQ ID NO: 17407 - DNA, 592 bp, Gossypium hirsutum
  Clone ID: LIB3830-001-Q1-N6-F2
cagaaaactcacatatattattattaacatcaagcagcgcgcagaagcaaaatcaacaaaaaaatctggaaataaaaataatgtggataacaagaatatgttcaacgaccaatcagacccttatcgatccatttgaaaaacgaaaatttattttaaataaagcagacaaacttcatatatatccgctcatgagagaaatccaatgcacgccaatgcaagcccaacaacgaatcccaaccccatattccttccggttgatcctgaattatcagcagaagctggctcatctgcggttgctgatgctcttgagttcgatttagaccctgttgatgatttctttgtcgccggtgaaggtgcagccgctggggatttagcttcaaaaaactcctcaggcaacaacaccttgtccgcttgataaattgccagaggtttcttttgatataatgcgttgttaatctgagtctcgacaaccccgcttgagacgttaacctggttgttcaggccagttacgttgaggccgaaatcctcaccagcttgggttctaacggggttgctaacaaattggagatcgttcaaggagtagtatttggga

SEQ ID NO: 17408 - DNA, 607 bp, Gossypium hirsutum
  Clone ID: LIB3830-001-Q1-N6-F3
gctcaaactcgaggttttatgacattaatcaacatttgcgtattactttacattgaggccgggatagaattatgagcatacgtataaaacaacagtatttatcatacataagcagcacaaaatctcgtccttatttgcaagccacctttgagtactatctttcaagtaacagtgtgaagcatgtaaccaagacacgtagattcaaagttcaaacccttttgacaaactccatgatgtatgtgccgaacgcgcagcattttacttggaaaccttgaaacccagcactccttgccaaggcctcgaattctttctcagtcctctctttcccaccaggattgtgagccaacatgatgcaatcaatatggacaactaactttgtggcaaggctaggatctgggtaatctgggagaatacattctgcaacaattacttttccgctgtccggcaaagcttcgtagcacttcttcaaaaattggagcagtgctcatcactccaatcgtggcatatccacttcatgaagatggcgtctccttttggaacactttcaaacatgtctccaccaacatgctccacaccaggataagcaggagcatcctcaatgacatga

SEQ ID NO: 17409 - DNA, 372 bp, Gossypium hirsutum
  Clone ID: LIB3830-001-Q1-N6-F4
aaaaaaaaaaataaaaaaaaaaaaaaaaaaataaaaatttttattattaaagatgattttttttaatttttatataatttttttttttttaaaaaaaagagaaaaaggaaggccccccaaaacaaaagaaaaaagaaaaggcccccctaatataatttttcccaaagaaaccaaacatgtaaaaaaaaaggggaggaaaaaaggcccccccaaaaagccccaaaaaaaaaaccaaggccaggaacaatttaaaaggggaacaaaaacacggaaaacaaaacacctggccaagacaaaaagggggaaaaaaaaacctttggggtaaaaagaaaaaagggggggacccccaaacaaaaaccaagccccaaacaa

SEQ ID NO: 17410 - DNA, 536 bp, Gossypium hirsutum
  Clone ID: LIB3830-001-Q1-N6-F6
gaagcatcaaaataattctttatgattgcattgcatatccttccactatcaagattacaaacattaattgctgcatggagtttctccggttccaaaaaattcaaatgtgaacccggatcacgcggcaaacgcattaaggtagtggtccaaggatggacaactgaagacattaggcgcagtcccctaacggccggtaggagaaacgtgaagttgatatttgatgaacctagctaactgaaaaatattaaaagatttgtgtcaatatgccaatctggttctagttgccgaacaaaagatgtacgcccattttctgtgctgcaaaagagaaccttgtcctttaccaaaccaccggaggtgaaaattccagcattttccaaggccagaagaacaattttttcgctttcatcatcaataactctctccatgagataaagatcgcaatatttggtaatctccaatagcacatccaacactgaggacttcactgttgcttgtttctgcagctcctctggactgctttcctcaagattactcca

SEQ ID NO: 17411 - DNA, 622 bp, Gossypium hirsutum
  unsure (1)..(622): unsure at all n locations; Clone ID: LIB3830-001-Q1-N6-F8
gaaaaaaaaactggtttgagcttcagtacatctaaatacatttgtctaaagccagaatacataaaagtctgaatacataattccagatgacacatactagaaacccacaagatggtggattctgagaccagcaaaagcttatgcatactattggggtggaattctaccgaccggatcagggaaaagcagttcgaaataaatnccattccaaacaatgtcaagcaactgggacttacctgcaaaaatatctgatttatttcatgaatgaaaaaaatatgaccttgaccgcgtcaggcgtctgcgtctccttgggcttggggatgcgtcttcacctacatcacttattacacgcacatcatcttcatcgtcgtcatcttgcaaacccaagagattctcgccccaaaggaacctccgctcagatacagctcctccagggtgtcgatgccttgaccaaaccctggacctggctcttgattcaccaacattgtcgactgaaccaatctgaaacagaaagaaagtagtccaccatggtgaactcgcttcaccggtgctattctcccttcgagctgccaacctatctccattctcaataacatagtctccaaccacaaggggcaccagc

SEQ ID NO: 17412 - DNA, 604 bp, Gossypium hirsutum
  Clone ID: LIB3830-001-Q1-N6-G1
ggttaccggtgattgtaattatttatgaaacttgttcactatcttcttcatcaatatcaccatttatcatttcatcttctaaatcatcatcatcctcaaaatcttcatcttccaaaacttgttcatcattaggctgcacaaattgcagcttcaaacgcccatcttccctacacgcatgcaagaattcttgcgtggggatcctcacctgtttcagcacaaatctgccatcttgcctgtaagatttaaagcaaaaccatggcttcccacttttcccaatacatgaaatcggcggtggaaatcctcctccactacttgctcttgacctcttcatttcaccattctgattctccattgttgaatgctttgttgttggtgatggtgctttcgtctttttgctttcccagtcttggttcatctcattgttcacctcttcaacaccataggagctctcaaatccaagctcttcagtacacagctggaggctctcagggttcaacgagaagctatcactcttcttatggcaattagaactgttttcaccatttccatgggaataaacaccaatactcctggagaccttcaatgtaggaaaggaagagtagta

SEQ ID NO: 17413 - DNA, 589 bp, Gossypium hirsutum
  unsure (1)..(589): unsure at all n locations; Clone ID: LIB3830-001-Q1-N6-G10
gaaatcaaatgaagtagtttattgcaaggctcaatggtgtccaaacaatattcaaggaaatgaaaaaaggggtcagagtaaacataacctcgaaacccaaaatctttcaagtacaacactcatcaatatagggacccaattgttcatttgcaagnngtgaggaaaaagcacttttcattcaataaagctatcacatggattatggtaactattcattttgtttttactngncagatattttattcacatctccaactaccttattaaaataaccttcaactgcatctccatttgagcaatgattcttcaaaactgtagaaatgtcagcttcagatgcgccggcaagcttgaagcgttcaacggcagtatcgagattctttttccaaccatccattcctaatttgcattcaacttgggatcgttcgaagagcatgttgccccagaaaagagtatttgtgatctcatcacagctgcttgttctgctacttcttcggctgaaagctcacactgattacctgttcctgggaactcattttcagcaccgcttcccagtttcttctttctcttcaacactcttccttcttgcttg

SEQ ID NO: 17414 - DNA, 532 bp, Gossypium hirsutum
  Clone ID: LIB3830-001-Q1-N6-G11
acaataatatcattagaatacatttttatcaaagatctttaaataaaatacataaacatagacatgagttcgcccaaatgcacaacaatttatacatgattcttatttcatattaaagattaaaacacataattgtcaatgacttctttagtttttgtgggaattgttacatacccaatcttcttagggctaagttctccccccctctcatcatcctccaaacaagcacgatgataatcagaccgggccgagaagagggtccagaccaagtagagggtagccgccgtgagagcgccgctaccgacgccgaagagaagagcgacgaccacgctaaggatgtccttactgcgctcacggagagagctcaagacatcggagggcttgggtcttggtggtacgacgttcaattgaccgatctcggtgaagacggtgacgaatccggtggaggaagaagggtcgttagggttttcaaaagagaaagaataggaggcgacgaagaatgtcttgcagggtctagcggtggctgatgccg

SEQ ID NO: 17415 - DNA, 578 bp, Gossypium hirsutum
  Clone ID: LIB3830-001-Q1-N6-G12
agacgactaacaacttggaacattatgattacagaataatttaacagttgaatatcagcttaataattttaattgcaacacctgtatgaacaaactaaaagcaagcattctaaaattaatataactatgctatgccacgctacactggagttctttttgtttttaatttccttccacgcagaataacaatagtttgcttaaggtgagaccccccttcttgttaaacaagctcttttgtagctggtgatcctttttttttttatttaaacaccgaaattgcaggcttggacgaactccaaatcaaagtcaacatacttactccaaagaggcttgaactgattcatggcaatatctagccacggcttcatattcccattgaagtgcaccaccgcggcattgcggatctcatccatgctaatgcttggattatagccgagtccaagaacgtgccatgacttgtctaacggtttcgtcgtggagtaaaatgtgatcaaaccagggggcaatgttcccaatttccatagagtcctattctcattcagattctgccagtaatgatactcctcagtacacttttc

SEQ ID NO: 17416 - DNA, 586 bp, Gossypium hirsutum
  unsure (1)..(586): unsure at all n locations; Clone ID: LIB3830-001-Q1-N6-G2
atgagcttgataacaatttcattaagcagaaatagagtaacaaatggaacaagttaaacaaaactgtagcagtaaggagacgagcagcagcaagttgcagaccagatgaagcaatttgtatctgtaaagtttacacaaaaaaacctgcaaaattacnctaanttgatcaaaggtaaaaatccagagtaaccctttataccaattcactcctcaacagcccccaggttctcaaagctcgaaatcttcatctctaagagccagctcagcagcctcttcatcttcttcctcaagaataaagtactcatttttctccaccggcctaaacatgtaaaagataatcaaatagaacgccaatgatgcggtctcctccgctgcattgctcacccattgatacttgtaagctgcaatcgtcctcaaagcaaacaccacaattctcgtaaaatatagatatccaatcaccacgatgtaaaactgcctaaacagagttaactttgccaaattcctcgcagccttcccatcagttnttcgaagtttccctcaacgaacganatagaccaaacaattgggaaaataatggcgcaacagc

SEQ ID NO: 17417 - DNA, 585 bp, Gossypium hirsutum
  Clone ID: LIB3830-001-Q1-N6-G3
gcaacagaagcaataatttatttaacttctactgtaataagttgattgactctgtttaggattcttttttacattattcaacttttactgtaacaagttcgaagggaagaaagtctacacggtacttctcataggcggcttcgctggctcacttttgtttgcttaaaactggcaaaaccagtgatttccctaccagttaccaagctgttgatgtcataagtgccttcgtatgtgtaaatgggttccaaatcacagaatgcctttgcaacaagaaaatcggccaaaattccattgccaccaagtaactcccgcccaagagcagctgtctctcttgccattgaggtaatccacgactttcccaagctggcatgaccgggagtcattttaccctcttcatacaatttgcaaaggcgccaaccaacaagggtcattgcttgaatattacccaacatgcgagcaagtttctgctggttaatttggaaggctgccaatggagcaccaaactgtttcctctccttcaggtatctggcacacatatcatagacacccatcgatatgccgataggttgccatgcaaccattact

SEQ ID NO: 17418 - DNA, 591 bp, Gossypium hirsutum
  Clone ID: LIB3830-001-Q1-N6-G4
gataataacactcaattttaacttgtgttaacttctggttttgtttgacattaatctgtctgattgtacactgccaatattttatattttctccaaaaccctaattctaattttttccccaaaaaggaaatgtgtgggtctttgcagttgaatttctcatccttatctatgtattaacaatagatgccaatatcctttgcgctaggctcttcaacctactggaataatgcatccttcccatttcagctgccgctcccatttcatgcacaaattttacagactccgatagtcgattgagtagattcatcagcgcaattacttcattcctttgcaactgcaatatctgaatcaaattctcctcgtcatttacagagaacagaatcttcagtgcagttccaagaccagaaacctgaagctttccccaaagtcgacatttttcacacccaacacagtccatcaccgcactgatatttttgaattgtgcttgtattttctgtttcagttctggtcctcttcgtcctttccacaatttggcttcatcaaatggaagtgggcatgcagcttgcagttttggatcataaagtagctgct

SEQ ID NO: 17419 - DNA, 553 bp, Gossypium hirsutum
  Clone ID: LIB3830-001-Q1-N6-G5
aaaaaaaaaaaagtatttattataatttattaacgaataatataagccatgttaccaaaaaaaaaagagtgcaaaaatggcgtgaagaactttcgggaaatttacttatttcttcaataagtttgttcggtgccctaaagctaaaaatgcaagtcgctgaagagaatataaaatgtaccaccccccaagaaataagctaaaaacatgctatgtgactcactgagaattgatgctctcatgccatcattctcttcaaaattccttcggaatccaatcccataactttcaataggatgcccttcccatctccattggtatcgtctccaaaaacggcatgctgacagttgaactcgagtcaaacaaaccgagctgctcggcgagttttttcaacagttgaccaactacgtatgagatgccagacgccgttatcccaaggctgaggtaataaaatacagttgggaaataagctcggtttggttttctaacatgacctttccctagtgcaagcaaaatgatgcatattagagaagcaccggccattgctgctagcttg

SEQ ID NO: 17420 - DNA, 552 bp, Gossypium hirsutum
  Clone ID: LIB3830-001-Q1-N6-G6
tttttttttttttttttttttttttttttttttttttttttttttttttttttttaagaaaatattatttgtttttgaaacagaaaaaaatttccctttttttttggcaagatactctagtttatatatattctttagggccacgaaaaccaacgattttcaccttttggaaacttggcgctaccgttacattcaccaatactaggcgtctccacccttttaggggtgggggaattgagttacagatgctaatacaggcgagctgggatacaaatttacatattacttcatgcggattcatatttaattcaaagctttatagcgtcaacatgccctttacgagcagtttgggtcatagcttgcaagccccagcagctcaggaccttccagtcggggatttttctcaaagttgttcaaaggaatgtgctcaaacgggccactggtaggaatcgttccacacaagtcattgtttgagacatcaacaactttgaggcttgaaaaccgacaagttccctagggatagggccagttaatttgttggcattaagctgt

SEQ ID NO: 17421 - DNA, 537 bp, Gossypium hirsutum
  unsure (1)..(537): unsure at all n locations; Clone ID: LIB3830-001-Q1-N6-G7
aaaaccaacaaaagagattttaattaattgaaatgcaataatctgaattaagaactgtagaagctaactctcaaagtctaatacaatacataaaaccataaatttcttattgttcatctaagctcagtaaatatgataaaatatatccnngtganatttaggaacatatataaatgtatctccctccaacctggaaaaccagacaatcatgtgttttcacttggaagcaccattaggaatcttggcggatatatcgcccgatgggatcagttcatcccaagcttcaatccatgtcaccatagcatccgccagcttattgaagtagtcatcgaccttgccgagtttcgccttcacttgcttggagatctcgatgtagcatttctgtacggtggtgcagtccttcggaagggcaacggattggaagaaaggaatcaactcttcttgccagtaaattcctttgtattctttcttaaggttcacaaacgggttgctcgctttgctgtgccaaatgtagggaagtccggtcttcactcccca

SEQ ID NO: 17422 - DNA, 576 bp, Gossypium hirsutum
  unsure (1)..(576): unsure at all n locations; Clone ID: LIB3830-001-Q1-N6-G8
aacaaacaaaaaatcaaatatttttaatcacaatcacaaattacaaacagtaacacaagcatcgcatgcaaaaataaaatccaaaatcaaaatcccccaaaaatagcccagaaaacagcaaatgacgaaaaacccattttcnatgcttaaagnncaagctcaccgcaccagctgcatcagcacntttaaccggtcttttcggacttttaaccaaancannattctccggaacaaccggcgccggaaccaaaaaagaaaaaacccaaaaatctccaacggcaaaagcaccttatccacctgataaaccgcgatccttcggtcagaaaacacactattctccaccgtcgcattcaccactccggtcgtcacattcacttggttcccctccgccgtcacattaagcggaaacttcccacctttaacatccccagcttgggttctcaaagggttactcgcggtttgaaactgcgacgtcgacattaacgtcgggagtatatggaactgaaccaactgaagcttctcttggtcggaaagtgagtttaacgtcccgggtttgagtccggagaacgcgttgtc

SEQ ID NO: 17423 - DNA, 232 bp, Gossypium hirsutum
  Clone ID: LIB3830-001-Q1-N6-G9
gaaaaaaaaaacccccaagaattcaaattccaaatggttcaaaatccaagggtttcccatcaacaaaaaaaatttgttttaacccttccatctgggttttttaaacaaagataaattcccttccgaatctctttttttttttcaccccccccctttataagttcatgaatccttgaatggcagcaacatcaaaggccttattggtccgttccacccgaaaaaattgaaaacc

SEQ ID NO: 17424 - DNA, 611 bp, Gossypium hirsutum
  Clone ID: LIB3830-001-Q1-N6-H1
acatcgaagcaatctgcaagtcagctttaaatttaggttttctattccccatctcagaacatgtaattaattagctgccccttgcaaattaaactaatgcaatgtttaatatacaaacagatataccacacccttcaaaatttgatattaagttggttaaattaaaaacctgacaataggagacaaatccaattaaatcatgacctacagcacatgttgctctttgctggaatttcttgcgctggacctggaatgactatcttcttgcctgctagagacgcggggttgccattcccctgattctcatcagcaaccaggttcttcttgttcacgatgttgaagatctccgtaagcacagtcatgaaggcagtctccacattagttgcttcaagagccgaggtctccaagaaaaatagtccttccttttgagcaaattctttggcatcctcggttggaacttctcgttggttttcaaggtcacttttgttcccgagcaggataataacaatgttcttgtcggcatggccacgcaactcttccagccaacgtggaatgtgatcgaaggtctgacgttttgttatgtcatacaccagcattgctccaacagcacc

SEQ ID NO: 17425 - DNA, 606 bp, Gossypium hirsutum
  unsure (1)..(606): unsure at all n locations; Clone ID: LIB3830-001-Q1-N6-H10
aaattgaatcagacccaccccgtaaaatctagttaggtgaatcacacattttgctcttgcattaccaacaaaatcgtaagagattttttacaaacaagataaatcccttttagaatcacagcaaatcaacaatagtggcaaaaaggaaaattaaaataanaacaaaggtttgtaaaacaccatttagcactccacgccacattgtttccccaactggacctgtttgtttgggcaagaagggatcgatccgtacccaaacaagtgagaaaatcgatgccaaaagtatggaccaaagcactacaatggtgggcgtcctgttttgtctccccatcaaacctttgaggaatgggtaaagatgaagaatgacccagaatgcgaagaacagtttgccgaacaatggaccccatgaaccatagccgttgttgattgcgtctgaaactccggccacaactccgaccatgttcagtattatcagagttgtgggagggattaagagagttgtccatttgaagagataaagttcaccgaattctgtatcctctgctgcttttgctgttacggtgaagttggtgtctactccagctaggactttgaggaggccttgga

SEQ ID NO: 17426 - DNA, 520 bp, Gossypium hirsutum
  unsure (1)..(520): unsure at all n locations; Clone ID: LIB3830-001-Q1-N6-H11
ctcttcaggcggngaaaagtcaccgtcgataccctgcaccgagatccttccgtcggtataaatgtccgggtcgaacagataagcggatccatcggcgtgcccgaatttaacagacccatcagcttcttgagctgatactttgtgtggtaaccttaatgtatcgtacgatactttcccgaatcttctcaccgtattgtacatactttcttcggtttggtactccgggattatgtgataataaatgatttgttccggtgcaccgggttcgcttaattgatcagtggttaacttagccatggcttcatcgttgggtgctaatacagttaaaacgtaaccctcggaaactaatcgacccatttcagtggctaatgatgttaaattcactaatatatcagccatttcattgtacccaccgtattgaattagtgtttgaatgaaatctttgacttgcctcattccgttgaaatgatggtgaggtccaccgcgtcctggagctggtgccggggctagtgatggacct

SEQ ID NO: 17427 - DNA, 526 bp, Gossypium hirsutum
  Clone ID: LIB3830-001-Q1-N6-H12
atcaaattagcattctttgaaggaattcaactaaaattgacacgggaaaaagcaaacacacaatccgtatgcagatgacagtctcaaccaaatgaacacacatcaaaattggtctaaaaaactgcaagttccaaactacaaagataaccaaaatcaaaaggctctgatactatcaaatgcaatctcatttcttcttggcagcagatttggtgaccttagcacccgttgggtccttcttctcaacgctcttgatgacaccaacagccacagtctgacgcatgtccctgacagcaaaccgtccaagtggtgggtactcaaagaaagtctccacaaccataggcttggtgggaaccatctttatcatccctgcatcaccattcttcaagaacttgggctccttctcaagctcctttccagatcgcctgtcgatcttggtcagcaattcggaaaattcacagcaatgtgggaggtatggcagtcaaggactggggcatatccgtttccaatctgcccagggtggttcatg

SEQ ID NO: 17428 - DNA, 582 bp, Gossypium hirsutum
  Clone ID: LIB3830-001-Q1-N6-H2
gaaaccgaaattttatcaattattcttaaactacaagaacaaatgacaaagtttgcaagaaacaaaagaacatgaaaaaccaaaacattttaacggacgtagaaacatcaataattccaaaaggggctggcattttctgagactgacaattcaattactccatctatgccttgtttgcaatgttgtttgagagccagtccagtccctcgtacagtccttcaccagatgtggcgcatgtactctggatataccagtgacgctggcggagagaatgaaggccaagcttgtcggtaatctcagcagcattcatagcatttggaagatcttgcttgtttgcaaatactagaagcacagcatccctcaactcatcctcattcaacatcctgtgcaactcatctctagcttcaaccacacggtcacgatcattgctatcaaccacgaaaataagtccttgcatgttttggaaatagtgtctccaacaatggtcggatcttgtcctggccaccaacatcccaaacagtgaagctgatgttcttgtattcaacggtctcaacattgaaaccgatggtgggaatggtagtg

SEQ ID NO: 17429 - DNA, 551 bp, Gossypium hirsutum
  Clone ID: LIB3830-001-Q1-N6-H3
gtagaaaaaaattcagaggcaggtaacaatattatattcacctcaaaatcataacaaaaacaaaaaatgtaaaaaggttcacaactcaacagttgtttgttgtttgttataagttcgattttcgagtatttcgaaaaaaaaattattctgttttttttagaatgagatataccaacttaagaaaatcttaccgtggagaacccatagtgaagaagaagactagcaatcaatctagtttagcaataacagcatcaacaacttcctgggtagtgctttgcccaccgagatctttagttcgatactggccctctaagattacacgtttcactgcactttcgagtcgatcggcaaatgaaggaaactggagatgtctcaacatcatggcagaggagagaagcaatgccacgggatttgccgtcttttgctctactatcttttcttttccaacatttcccgctgaagcaccttgctcgaacacggcatattcagctcccacattgcctccaggcatgacaccggtgcctccagcaataccggccgctgtatttgca

SEQ ID NO: 17430 - DNA, 523 bp, Gossypium hirsutum
  unsure (1)..(523): unsure at all n locations; Clone ID: LIB3830-001-Q1-N6-H4
gaaaccgcatatagatatttagttataataaatcagctaattccaatcatgtttcatttaaagacaaagcataaacacatataagtgtatatatatatatataggaggatagaagttcttccatttttctanattcacaaaagctctaaatacagtaggaatacagagttttgtttgacccccagttcaaccgattgccatttctgaggtagagtgaagaccttcctctttatgctttactctcagacctaatattatattttaccaatagattctacaaataccctcatttaacttataaattctcattgagaatagtggacatcagcagccctcggacaaattcacacctttgagccttctcctcgtgctcctggtccgacagttgtgactgttgaggctttctttctagagatctttatctgggctttccttgtctgcacttgattcagcaatagagagagactgcaagcttaaaggctcatcggctgtgggtggattgaacataaatgatgacaataat

SEQ ID NO: 17431 - DNA, 538 bp, Gossypium hirsutum
  unsure (1)..(538): unsure at all n locations; Clone ID: LIB3830-001-Q1-N6-H5
gtggccatcagaggaaggacaaatacaccgctgttcttatagagactattattatgcctctcatgcagccaatataaattaccacaagttttcacaaaaaaaaactagcttttattttactacaaaatctgtcttagaccaatgaaactgcactcaactgatcttaattgaaacaaacaaaaaaaaaaacattccgaaagaacacattgcagaatgttgaatgacaaaactagcaaatcctcgtgattcaggtatcatttcaagatgatttctcctttttcaatttcgcgagttcttgcctgacaaccccagccctcttgatcttagctaacataagcttgaaccgatcaaagtcgttgagagatgctcttctcttctgaacaatcaactttctaccccatgagctattctcccacttgttcttaacatcggccttctccatagcttcaatcaatgtcttcttctttggaaccggggaatgtcgattgtgatatctgtcaatgtaagcctcttganattcatttggcctctgaccata

SEQ ID NO: 17432 - DNA, 571 bp, Gossypium hirsutum
  unsure (1)..(571): unsure at all n locations; Clone ID: LIB3830-001-Q1-N6-H6
gggaccctcaaacaagcttttattagactagaagttgaagctgacattatgatgtacaaaggacgaaacaggaataaaagctagttttaacataaagctacctaaacagaaagttactgccatttctcataaccaaacaggtctttgtcttttttttttnnttcttcttttcatttcccattctacaagtactgggactcagttatccacctggagactgatccatatgctatgcatttgcagctcctatattcccatggatccatagatttagaaggagaaagcaaaggactactctgtggcagcaacaactgttggcccttccaccttgaatttagcaccccataagtcctcttcttcagcaggcactgcagtgatcttgttcttaggattctcatagcttcttaatcctcctactgctgtggagtagaaacagccttgaggaaaagaagcaagagatttgccacaggcacctttcagcaattcagcattatcagcaaaggccacatatccgtcggcggtgattccccaatagagaggaaccttaccaaattgatcagaagccacaaac

SEQ ID NO: 17433 - DNA, 584 bp, Gossypium hirsutum
  Clone ID: LIB3830-001-Q1-N6-H7
agacattgttatgcttaccatcatgattactacttcacaatcacctagtactagagttctgatcaacattagagatacagcttcttactttgggcaaaagcaagaagcacggcagttattaattaaacacacagatatcgctaccattaaacggttagtgattacaaacaaaccatttagaaataaaaacttagatgggtcggtagtcagcgtatcagtggttaccatcgccagagtagtgtcatcattgcctatcggtagtaagcctgctgatatgctggtgccaaaccattaccatagcccccgtatgcaggatagttcatgggagctccagggtatgaaccagcaaggggaggaggggctgcttctggtgagtaagcataggggttggtgggtgggctcctgcttccaccatgggaggtggggatgggtatcctgggactggagtagggtactgggtgtgggagggagaccttacaaatggaggaggtgccgggaaagagagactatgcattcgtcaaacgccagctttagcaggaggcatcggaccaccattatttacacgcgttcgcttgttagcaggg

SEQ ID NO: 17434 - DNA, 608 bp, Gossypium hirsutum
  Clone ID: LIB3830-001-Q1-N6-H8
acagccatgtcaaaataatcaataacttgcaacaacacaagaacatgaataattcaaatgtttgtaatgatacaaaataacgtaatagaaacaacaagaatgtcttgacaatacaacacattgattacacaaaagaaaggaattaaaatggatcatgttcaagatgatgagcagcaagccttcttggtgttggcttccccccctccaacatcaatggtcttcccttctttaatacttgctggtgctggctcatctgaagaaagtgacttcttactaattttgcggtatatttcaaacagaatggtctggaaagccttctcaacatttattgcttctagtgcagatgtctgaataaatgaaaggccttctttctcggcatagctttgaccatcctctgtggcaactgctcggagatgcttcagatcagtcttgttcccaatcatcataattacaatgttagaatctgcatggtccctgagttctttcagccatcggctcacattttcaaaagtcgttggcttggtaacatcgtacaccagaagagctccaagagcacctctatagtaagcactggttattgctctgtaccgttcctgaccagcagtgtc

SEQ ID NO: 17435 - DNA, 590 bp, Gossypium hirsutum
  Clone ID: LIB3830-001-Q1-N6-H9
cacaatatagaagggattttgatgatcctttttgacaaatacaaatgcaaacaaaatgtacttttcttattactattaaacacaaaattatgctggaactttgataccaaaggatccacaagttagataaccccttttgctcacaactttgtttttttttaatccaaagcatcaacaagataatcggcatcatctttggtgaaacacattggtggctttattctgaaaacatttccatgcagcccacctttcccaagtaaaactccgagttctctcatattctcaaacaggatggcagtttttgccttggccggtgtcttctccttcctgtcggtaacaagttccacacccaccattaagcctctacctctgacatctccaatgatatcatgtttgtcctgtaaagatctcaagcgtccgatcaagtgagaaccaaaatcagcacaatgtgcttgacgcttctccttgtctataactctgagcactgcaagtccaccagcagaacatacaggatttcctccaaaagtgttaaactgaattttttgagccatcacatttgcaatttctgggtgtagtgaccactgcaccta

SEQ ID NO: 17436 - DNA, 540 bp, Gossypium hirsutum
  Clone ID: LIB3830-002-Q1-N6-A1
acaaaatatgtaaatttattatagttactgggtatttccataccctgacactcgataaactctggcacaagttttcccaaatgttacaatccaaatgtatttttgccttccacaacggagggaatttttatattggatacaagtgtaattaagcatacttactacatccttctcaaattgtctagccttgcttgtaagtcactatttatcccaccgtcgtcattcccggttgcttttgcctgcgcaaccttaccctttgcagctggtgcaaaaacagcagctgatggtgcattgacaagctcttgattgatatcgattccgatttcatcaaaaacttggctcacaagttcttctgtttcttcctcttcttcatcaccttccaaagcatcatcaatagcgtcacccattacctcactaaccatttccatcttctcgttctgcatctcaaattcttgcataattttctgcaacgacggcaagttcatctgcctgttcatccggcccattgcctttgtcacacctttcattgcttctcccatt

SEQ ID NO: 17437 - DNA, 496 bp, Gossypium hirsutum
  Clone ID: LIB3830-002-Q1-N6-A10
gaactcatgagattaggcaagtcctggtcatgcttttcgaccagaatcaatgttattctaaaatcttccacataagatcttccacttttattttgtatgtgagaaaccttctttggtaccagatttctttcatagagcccttttggaacgcaactacgacagaaaaatttggatcttcctctttgatcaggacaaaatccaacattttgaagggatggaaactcgacttcaaatgggcaaagctatgctgactcaacgagagaggcattgccctgataaagaattacatcgttcgcactgtaaatttctgatatcgtgctgttgtgcaagttttattataagaatcaaggtataccctggtatgatcatacaaagacatctttgaactctagaggcaactcaacaaggtcttgcttcgtctctgtggtcaggtcaattctagtattcaccaagctcacaatttctaatgattccttgagaggtaggatctgtttat

SEQ ID NO: 17438 - DNA, 549 bp, Gossypium hirsutum
  Clone ID: LIB3830-002-Q1-N6-A11
ggaaacggagcattttttttcacttacaaaggcatttggttacactaccattccagctgattgaagcaacaacacaacacattttctgaaactatgcagtaccataaaataaaatcattttttttattgattgctaatttttttttttagtacattaaggctttcttctgttgggaattgaaaaaggactctagacttccttcacttccacagctccattcacttgtttctcttcatccttacccttagaacccttaacttgttcaccttcaatctcaaaagctgatacagggaaagtcctaaacagccctgaaggggtcttgaaagtgatcttcccagtgggaggatcatccacttggatatcactcagtgtgatccaaaccaaagctctttggtcttcaccccagtcagcttcttgatcttgcctttctcaacgacagccgtgacttcagttgcataggaaaccagcttccctatcttttcgaacttgtgggtgatgctcttcttttgtttgagccacacgaaacctgtgtccttcacgtacccaca

SEQ ID NO: 17439 - DNA, 575 bp, Gossypium hirsutum
  Clone ID: LIB3830-002-Q1-N6-A12
acaaaaggatttatctaagccattcaactttaaatcaaaaagtcatatagaagcagattatcccatctacaactattaatttcagaaggtcaaaaggaaccaacaggattcagaggtacatttctcccttagatggcatgcgcatctaaaagaatttttttaaacatcgaaagcattaacatatggttttgatcaaacactatcacagcctacattgattatgctatccaccacggaccttcctactcatcatcttcttcgtctccgctgccttcttcatcatcatcctcatcattcacctcagacactgatttgtcagactcaacatcttcgtctttaggaccctcagcctgtctcttattgtaggccttcatgttcttttcatactcgacctttcgcttttctgccttggctacataaggtgctttttcagcttcagacaagctcttccatttatctccaccagctttgccgacagcggcaacggatttgtttttagggtgatccttcttgtattgctcacggaactcctccatgaaaacgaagaagcactagcaggcctctttggcttgttt

SEQ ID NO: 17440 - DNA, 534 bp, Gossypium hirsutum
  Clone ID: LIB3830-002-Q1-N6-A2
cactgccacaatacatcttctatatatatatatatatatggattaaacagctttttccattgtcattgaagcttagagctcataaattatgtgaacaagaatcctggtaccaaggatacaagtacatttaccaactttgacaaatccttagaccttactggtgacaaaatctttgtcacttgcttcccagatggtggtaccgtcacatgcacatatcttcttgtagttttcaccaaccccagcacttcgggctatcactgcagccgtcagacctggatccgatctatcttcagtctcataaacagctattgaccgcccaatgagatcagcaaccctgagctgctgtttgacaccagtgtaaaaggactcaccgttcttatccacatctagagttcccaggtcgccaactggctgtttagcagttccttcatttgatggattaaacactttccctgtacttgcagcacctcttgtcagatcaccaaattcattaattgaccaaccgtgttttccaggtgacagaccactaaaact

SEQ ID NO: 17441 - DNA, 554 bp, Gossypium hirsutum
  Clone ID: LIB3830-002-Q1-N6-A3
gccacgtaaagccttcaaagaaacacgtaataagaaaaatactccaagcatccatacaaatctttctagttgtacaaatagaggcctacagtgaaatatgtcaataaacatgatactctggaatatcatctacatctaaaattccattttaactatttcattcgaaacatcagaagatccataatgtagccagtccttggcacagattagagcttccactgtctccggtcgcaaagagctacgatattcatctagttgcttgtctgtgatatcaaagattgattcggtggcagcagcagacaccggaatcgacaaaatgtcgcgagccatcttggaaagagtaggatacttcatcttgttcagcttccaccaacccaacacatcaaactcttggacacgaggtaacagggactcttccaagtactgatccagctcagacttcatctgctggctattagtctccataatgtagacatcaaaatctgcaagcccatggtccgaaagaagataccttgatgagattcgttggtctttccattgtttgcaccattcac

SEQ ID NO: 17442 - DNA, 522 bp, Gossypium hirsutum
  Clone ID: LIB3830-002-Q1-N6-A4
gcttgaaatgaacattgcaatggttcaaccaataatcaaaaatgaaaaccatgttcaaggtctcaaaagaaaattaggttgacaattaaaataaaacatcatagcagcataccaggtttaaaacgagtaggttatttcttgggtcttttctggtttataacctgagatgacgatagggagaatttcacttgttccgatgcagcaaagcccttagcttccatcaattgaagtatcctttgagcatcttgcacaaatccacctgcacaaagtgcggttataattctctcgaactcattgggacctagttcatctttcctagcttccaaaactccaacagcttgaagagcttttttctcggatgtagccctcgagtacatatcacagaggcttacgtgaacctttaaaggaggaacttcgcctagttccgcaatcttgtctagtaacttttcggtttcgtcaaccagccgcaatctacccaaccaatcaacaagaacggtatatgtttctatgccgggttcaaaa

SEQ ID NO: 17443 - DNA, 472 bp, Gossypium hirsutum
  unsure (1)..(472): unsure at all n locations; Clone ID: LIB3830-002-Q1-N6-A5
acaaagcaaaatagcctgtgtcctctacagaaataaatgcaaaggaaaaatcagattacaaattaaatgaatactttcacaaatcactatttttgaaacaataaaacatttctacacacgtcaaaatcaccggaagactatgtacactgtaatattatgatataaaattggaaaaaccaaaacgtatgttccctacttgatcaatcatcaaatttccgggaaaaataataatagtaataataataataatgataattatctctctcaccttcttcacttgttagaccactggaattcgatttccaaattccgtgatggcccacttttactttggggcaataacgtgtactcaccagctaccgatccaagcattacaactcgatcaatntggnattgtaactttccaaaggaactcttttccattttgctcttgttcttgcaagatatgtgcagcttctggcctttggaggac

SEQ ID NO: 17444 - DNA, 550 bp, Gossypium hirsutum
  Clone ID: LIB3830-002-Q1-N6-A6
aaccgaaattaattttcattttaatcaatcattttgatttctcactctatagtcttgagattttttttccctcacacttttttaagtatagattttttttttttatcaattgggttcaaaaataaaaataaaaaaaccacaagttaaccgaagaatttttttaaaaccgaaaccgaagaaaccgaattcaatcaatctattcgaaaaatgccattttgctacccctatcgtctttatcttgccttctctaatggctaaatgctctccagatcatgcgtagtaatttaagcttgccttcttcttagcttgaacctgaattataccttcattgaaatcctcatgattcacctcagttgcatctcggcgaagtgctagcatgcctgcctctacgcaaacagctttcagctgtgctccattaaaatcatcggtcgaacgagcaagttcttcgaaattgacatccggatgaacgttcatcttccttgagtggatctgaaggattcgggctcttgcttcttcagtgggatgtgggaattcaattttacgatccaat

SEQ ID NO: 17445 - DNA, 593 bp, Gossypium hirsutum
  Clone ID: LIB3830-002-Q1-N6-A7
gagaagtaaaaacagtaacttggcaaggcaatctcttgtccagggatacaaatacattacatcaattgaacgatgtaattcatttaaactttagtataaaacgacaatgataaaaattgagagcagatttacttttggcttcatattttttaactatatttattgaaacaatcgacacccgctgcatatggtcagattatagtataccttattacctcacccaagacaggttcaggtttcgagtctcttctatatctaatgaacttctgtggaatcattatcacttccctttgtgacgatgacactttcactgggagagagggtttcagagtcagaaacatgactaggggaactgtctaccttgccattgtcagaagtatcagaatccgagttcaaatcaagcgaattcaaatcaacaggtggctctgcggattgaggatttccccttgtccaaaaagcaggcatcctcttgtcatcctctctcatcctctcagcatacttactaatgttgaaacccgaatcatcatttccaccaaatgcagactccagcttctccatatcaaaaagctcatccattattttcttgctattgg

SEQ ID NO: 17446 - DNA, 468 bp, Gossypium hirsutum
  Clone ID: LIB3830-002-Q1-N6-A8
aaaccaaaaagttgggtttaatcaatattacgaccaactaatctgtctctccatacatgggagcatacgagattgtcacaaccaagcattggcagcaccttattacatacattctttcttggaaaattgcatgggtcatcaatcatgggaataaaaattacataagagcccccgcctttgggttgtcatcactgaaaaactgaggaggatattccagctccgaaaaatacttggattggaagtattcacttcgctttattacatcatcactctttctggcgtcttcttcttctggtttggtttctttggtggcctcttctgctggttttttctctgcttcttggaggtggtggtcttccttcttttcttcgcctttcactatggacgcttgcttgccggttctcttgtaaacataatcaaccagctttgtaggatctacggtgccttttacggttactttatcatttc

SEQ ID NO: 17447 - DNA, 432 bp, Gossypium hirsutum
  Clone ID: LIB3830-002-Q1-N6-A9
ggaaaacccggggttttgggccggggggaaaaatttttttttttaagcccttcaaggggggccccccggggccaagggggttttttccccccccgggggaaaatttttttaatttcctaaaaaaaaaaaaacgaaccttcggggggggggcccctttttaaaaaaacccaatttttttaggccccaaatgggggggagggggttgcccgggggggctttttttggggggccccccaagggggggttccccgaaaaggacccctgggggggctattggcccggggggcaaaaaagggggggggggggggggggcttttttcccttggggggggcaaaaacggggggcttaggggggttggcccaaaaattggggggggggggggggggggaaaacatgggggggggggggtccggttttttttttttgggggg

SEQ ID NO: 17448 - DNA, 399 bp, Gossypium hirsutum
  Clone ID: LIB3830-002-Q1-N6-B1
cgagaaagcgagggtcttttttattacattttgggtccacagtaaaccctgaagagggaccccaaagaaccacaccggggcctcacttttttttttgtaattcccaacaaactccccctgacaagaagacacaagcaaacgtgaaagcctccgaaaaaaaaggggactttaaacaagttcaaataattttaaccagttcctccaaaaacacccttaagttttttaatctgagcagcatccaaaaaaggggttccttcaataatgtcagtcggcaagtcatttgtaaacaaggcaaagtccaggatttggacaccagggtctgcactgttgaaggatacaaatgccacggattgagttttgcctgtattgatttggaaatgtaataaaccttgggggaaa

SEQ ID NO: 17449 - DNA, 561 bp, Gossypium hirsutum
  unsure (1)..(561): unsure at all n locations; Clone ID: LIB3830-002-Q1-N6-B11
aacttaaaaaacaacaaataaaacttatttatatttagattgattttccactttcaaaatatgcagaaactatatgaagcgtctctggcaaaagatttaaatagccaacaataacatttcaagttacttattgtttaaacagggttcatattggggaagaagaatccgaaattctgctcaaccccccgttgcttcaagttctngttgaacatctcgaagaaaaacgtcggcattatatattcaggtcttttcggagtccctttctgcgtcacatgattcaacaagttcttgttataagtttgagcgttcgcgacactcgtgtaaggctcgttaccggcggtcggccatccagtttcggctacaatgagagtaatttggccgaagccgatcttatctagggcggcattgaaagcatcgaccatgccgtcaaagaggttgtagtattccaagccttggtcgaccaccaccggtgcggtcgaggtgaacaaggcgtagttgagggaaatatgagtggggtctgaggcataggcaaaataagggtacacattgatcaggaggggc

SEQ ID NO: 17450 - DNA, 585 bp, Gossypium hirsutum
  unsure (1)..(585): unsure at all n locations; Clone ID: LIB3830-002-Q1-N6-B12
gtcaaataatactttttaatattttttataaataataaaaatatttacaacgacaatgattattaccatgagtttaaaagtttctctgcattcttttatatgtaaaaattaatatttatagatatgaacgttgaacatatccttcaatgagctgtttttttaatagtgttgaaggtccggtgagcttgaaccgcacaagcacaatgcacggaggttaagttcaagcaaccactcataacaagggagtgccttccagagcaggtatgaagtgcagggaatgtgtcacataaagcctgaactgctgatggagtcagtgccgtacactggcttatattcagactttttagaccatcatcttcatatctacctttcatcgacgactcccacgtcaaacctttgttcttcactcggctgtgagccaatgagtacatcgccctgtccgtgatgttacggcaatagtacagtccgagcgacctcaaatggaggcactcatttgctaaagcaatcacgctatcatctgttatacgaacacaaccacacaggtccaggcatcgngagacatggcatccatatgctaaactcatg

SEQ ID NO: 17451 - DNA, 545 bp, Gossypium hirsutum
  Clone ID: LIB3830-002-Q1-N6-B2
gactgcaaaagcaaaaacatatttattcaatgccatagaaccttgaaacctaaagaacaactaaaagcgttgataaaagcaattatttttactcgtaagcttccccagcctagtggccagctcacattagcatacgacccacacacatacaatttttttttatcaacaataactggacaggtgttcggcaccacacttaaaagccaccgcggaggcgaaggaccaggtgcaaagtggattccttctggatgttgtaatctgcaagggtcctcccatcttcaagttgcttcccagcaaaaatcagcctctgctggtctggtgggattccttccttatcctggatcttggccttaacattatcaatcgtgtctgagctctcaacttccagggtgatggtctttccagtcagggtcttcacgaaaatttgcatcccgccgcggaggcgaaggaccaggtggagggtggactccttctggatgttgtaatctgcaagggtcctcccatcttcaagttgcttcccagcaaaaatcagcctctgctggtct

SEQ ID NO: 17452 - DNA, 480 bp, Gossypium hirsutum
  Clone ID: LIB3830-002-Q1-N6-B3
ttgttttttttttttttttttttttttttttttttttttttttttttttttttttttttttttttttttttttttttttttttttttttttttttttgggcccccaaacaggttttattattattttaaaaaaaaaaactttttatatggggggggagaccttttttttaaacaggaacgggaaaggccccaacattgcccaaaacaaaaaggcccccaaaataaaaggttcttggtggcccaagcccataaacaaatccaaactaaaaaaaaccccccaccgggactttttaaattccaacaaggttatgttaccacgggccccttttttttgaaaccccctttcccaaaatggggcccgaaaaaaaaccctcaaagggcccttttgataaacccaaatgaaaaatcaggggctgaaaaaaaaaacccgaaaaagcaaaaactttacccgggccaaaaacagaaaacggggatggcttt

SEQ ID NO: 17453 - DNA, 534 bp, Gossypium hirsutum
  unsure (1)..(534): unsure at all n locations; Clone ID: LIB3830-002-Q1-N6-B4
ttgtttttacaaacaagataaatcccttttagaatcacagcaaatcaacaatagtggcaaaaaggaaaaataaaataataacaaaggtttgtaaaacaccatttagcactccacgccacattgtttaagaactggacctgtttgtttgggcaagaagggatcttnccttattcaaacaagtgagaaaatcgatgccaaaagtatggaccaaagcactacaatggtgggcgtcctgttttgtctccccatcaaacctttgaggaatgggtaaagatgaagaatgacccagaatgcgaagaacagtttgccgaacaatggaccccatgaaccatagccgttgttgattgcgtctgaaactccggccacaactccgaccatgttcagtattatcagagttgtgggagggattaagagagttgtccatttgaagagataaagttcaccgaattctgtatcctctgctgcttttgctgttacggtgaagttggtgtctactccagctaggactttgaggaggccttggaagacggcgaa

SEQ ID NO: 17454 - DNA, 571 bp, Gossypium hirsutum
  Clone ID: LIB3830-002-Q1-N6-B5
acaaaagatactcggattcctagtaataatattatacaggctgaaaatgtagctttctacagaaaactatggggtttacacatcccttagaaaattaaagttacaatttggaaagtttcctggaattatatccctacgcttgctaatcttaatccgctgccttttacaaataaagtctggtgtcccagatgtcaacagtttgaggaccatccccctcctctctcttagaatgtgtcctacaacgacgaaagtttggaggtatttagatttctcttgggtgcttaataataatattcagggcatttgggtgtggtttacttgggtcttcaatcgaggaacaagagagcagtgcagattgttttgctgtgggctttggcttatctggtcaaacagggaccaattgctttatgaaagtaaaaatagaacaagcagagagatctcacgataaataagcagttatatctcagagttgcaaagcttagaagagaaactacttatctctgatataggaagggtttttactcatgaagattggtgacgagggtagtcatttcttttgatggggcttttg

SEQ ID NO: 17455 - DNA, 545 bp, Gossypium hirsutum
  Clone ID: LIB3830-002-Q1-N6-B6
aatatgtgtgtgtatatatatatatatcaattagatttcatctcaatatctacatcctcattagaaacaattccagagtcatcctcaggaaggaggccaagtagcggcaaaggcaacaatgaactgagattgcataggattatcattaggtaagttgtcaaattatccttggttacaccaaacacctgggtgagtactgcacctaactgtccccctacaaactgcctccgtttgatatggacatcaaagttgcaaacagtgttgcttccatcccttccggacatagcttggctgcaagtacaagaaccggcatgaaagaaacctgaccaaggacagttagaatcaatgaatccccaatcgcaaaccactcatcacttattcctaactgccggttcaatccagttaccagcaacacctgagtcattccaaaggctgtaccgataattgttgtggcaagaaaaatcttccgcaatggaactctttttaaaaatccattatacaatccaactccgaccaatgatgcaaccgaagtgacaagttttaca

SEQ ID NO: 17456 - DNA, 631 bp, Gossypium hirsutum
  Clone ID: LIB3830-002-Q1-N6-B7
agaaaagaaatcctaacatggcttgataactgaaatgcatggaagagttttttatcatctaataaatgatgcagctcagcatttgatcatatgaagattgcaaaaatatgaccttttgtaattgaccatggggaagcaagagtggtaattaatcacctcgccttctggttcatcgctgcgcaatctaattgatgccattacatcaaatccccctttttcttcagttgagagatggttcaacctttcatcaagccctgacaaatgagaactacttaataaatcaatcagactccacgaagatctccacatctgccaaaggttcaaaagtttttttctctattgtgtcaaacactataagtccactaattctctggactccgagtttagttgcaaccaggttcaaatggaaatcagtggaaccgaatgcctccactgctggtaatgccattgtctgaagaccattgaacataacaaacttctcgtgtgcactattttttgataaccagacctcaaatgggcccaactctctgtctgtatggtttgtgagattcagatgtacagagaagggcttatccaaaatgattaaagatggtatccccagaacttgcagctcaatctctttgcaactact

SEQ ID NO: 17457 - DNA, 429 bp, Gossypium hirsutum
  Clone ID: LIB3830-002-Q1-N6-B8
gggggccccccaaattttaacaccacattcaaaccctgaaattcaagtaatttggggggggctgattaactattgggggggggaggattcccctcccctttgggacccagacaaactaatggatggtaacttggataaaatcccaacggccccccctctttttacttgggaggaaaaaggggtttggctctcaaccaagggttaaaggaatggcggtttaataggccccagtcatacacgaagtcccagtacgtacaaaatattggtgcaatggccgacactatcccaactattactttccatccaatccccgtgttaacgtaataagccgttctcaggcaaacgggtacgatggggaggaaatatttgagtccattgtatccttggaccggatctttttcctcaaaagggggggtaggcactggaaaa

SEQ ID NO: 17458 - DNA, 536 bp, Gossypium hirsutum
  Clone ID: LIB3830-002-Q1-N6-B9
gaaggaaaatttgtccaacacattaattaaaagctacaaataacaacagactcgataaagctacacaagattcttggggatgatgctactgcactaacaaatacagagactcttcctaacccctaacagcaacattgcctcacattattcattatttttatttataacgaagtaaaattatcctaaatcccctccccggccttctacaacaacaaccatttaaatgaaaatacttagaatcggattaatgtaattactgaccacaacctttggcaacaacacaaatcagagacaagaagttcgtaaaactgcacagttcagtgcatcaacagaagatggggctcatcaaacactaaacaaaaatcttcaaccaactttcactctatttcaccttcctgaatcaggtgaaccatcatcataagagaccagtccccttccaccgtctggacttcctgatgatgaccttgacttcgctttgctcaccttctttggagactgagagtttaacgaagaccttgattctgatcggctcctgc

SEQ ID NO: 17459 - DNA, 568 bp, Gossypium hirsutum
  Clone ID: LIB3830-002-Q1-N6-C1
caaacaacaatgctggaaatctgattgatagaattggtatataacgttacattttttaaatgaaaaaaaaatccaatttcacactcaaatttcaacaccaaaaccataataaaaaattcatcaaaatggaaaacctttatccctcgtctcaaaacgttcatttccagatcttgatacggagatcaaccttacatttggggccggagacattggccgccgtcggcgacttacctttcgggacaacccctttaatcccatcgcacgtaactctaatcccaactttcttgctcttcaacccacccattttcgctgtcactttagtatccatctcaactttcaacgacactccattccctttcttcagttccggtctcaagttgttcaccgtctccgcgtccaaatccgaagacgacgccaccgtaacccccctgaaagtcgactcgtccttgccgtcactgacgaatgccggcaacgttccgttccctatcagaacgtcgccattgctggtcacacatgaaatgacgaatgggtcgtactagaaggagagatgagagttcgggtttttgga

SEQ ID NO: 17460 - DNA, 589 bp, Gossypium hirsutum
  Clone ID: LIB3830-002-Q1-N6-C10
gaaatgttaggttgccttgcgtgctttcattataataatcacatctcatccttggtttataaatagtatatgtaatcttatttacacataaatcttaaacacgtaagactataatgttattaaattatacaggaagaaaaatgaaggaaaacgatttctttttacaaggggagctgtatgctagcctccgaaattcagtgtgttaaaagaaaaggaaaagggaaacgcataccagcaatttccacccgaagcttcccaacagaggtatataagccttatttgcaaaaggtccatgacagctgagctttatttccaaacaagactataaataattggaatctgtgaacagacaaagccccgaacaaacaatttggtcaccagagacatgcttgaagcagctttgtcataattttgagtgttgtctccatggggatcccccatcaaacgcctgctccaacacatcttccattcgcttggccagcagaatctctaggttggaaagcacagacgcaggtacttcaactaagtcctttagatttctctctggtagaataactctcttgataccatgacgtgtgctgctagtatc

SEQ ID NO: 17461 - DNA, 572 bp, Gossypium hirsutum
  Clone ID: LIB3830-002-Q1-N6-C11
aatccataagccaaactaggatcttactgaagaagagagctgagatacaggacgaaaacttaccagcagatggtaaaatacatatatagcttctcaccattctaatattactatggatcaccaatgcatatacattaagaaaacgagtttttttttcttataataattgcatccacaaaatgaacagcaaaacagcttcaccagcattcaaagccttgcctctcctcccttctactcacttgttctctaacacttctttcactacatcgatgatgcaagtcaggtcagggatcttttgcttatgttgatacagatcaaatggcctcagatttgctagtaggaacccaagaaacttggaatggttgctaagtgtgcagtgccatgaataaattctgcttgcaagcatgctccggaataagtttcttgacaacttctggagggataccagagagctcttgaggcttgaaattgaagagaggtggtagaggacggccgttgggaaggcgaacatttgggtccctcaattcatcaaagaaagggtgaacgcaagcctccaaagcagtgcatcgcaa

SEQ ID NO: 17462 - DNA, 601 bp, Gossypium hirsutum
  Clone ID: LIB3830-002-Q1-N6-C12
aagcaactccaattgagcattctgcaattaacttaaagaacaacaaagaataaacaaccattacttgtaacttcactatgatatggatacaaagaactgtagattatgatataccgattagatttccgagtgtgttctgatgaatgcaactattttttttcatccccattactccttactcgaagttcgacacttctcaaatcgcgaagatgttgtaaaatctcttgaagtagatagatccctttatctcctttcctcaaggagctgatacaatgttttagaaactccctatctgcctcaagtgcttgtaatctttcataaacatggtccacttcttcctctattgtgatcattttgttctcaagttcaggtaacgtatgttgcaaggcaacagaattgaagccgttttcatgtccattcagtatcttttcttcagtttctgcatcggtggcatcaaaaagtgggagaagtctctttgcctttgtagccacgggaattattttgtcttggtgatgcttcccattcactcccttgaaatgaccattggcaaccccatttgtttcatggccgaaatatgaatctcatggagccattaccattc

SEQ ID NO: 17463 - DNA, 493 bp, Gossypium hirsutum
  Clone ID: LIB3830-002-Q1-N6-C2
catcaaataagaaagagatttttcacaacaataaaaccagggtgttgaaatctcttatacacttcaatatttacaaagaggcatgaagataagacagttgactttggaaaagcttaaaatcatttactcttgttttaaaagcattatagcaatttaaaacattgaaaataaatataatagcataagagaggcatcttttaattgtagcggcagtcacaggatggcacaccgagcagcttgcttgcggagctcctctgtctctttctgggctctttctaaattctctcgaagcttccggatttcatcatttgatttcatttgagctaactgcgccaacttttccgccttaagccgtgctgcctgctcctttgctaactgctgctccaacctgacagtcgtctccttcagctttgactcaaccatttcagtaattcgcataagctgctcttcatatgatctttcaatctgctccttaaactcgaatatttctcgc

SEQ ID NO: 17464 - DNA, 584 bp, Gossypium hirsutum
  Clone ID: LIB3830-002-Q1-N6-C4
aacacatatttatatgtgtatatatccaaccaatatcaacttatcatcttatttacaatcaatccacaaaaatgattaatatttagacaccctaggtacatgccgacacaaaaagaaaaacatcaccacgtttgagtttgggatcgttgttgttcctgttttggtaaaattaagtacctaacctggaagaagtagctgctgccatggcacatttcgaactagactggagatctttggcaggtttcgattctgcactgatggcaatcttccccattccaacctccattgcctctctctcatccatctccgtcttctttttctcagatacattagcgtccacaactcgactatgcgatgaagactttgatggctctaaaagtcgagggcctgcattgatccatggatgttgaaggcactgagtagcagtgggacgcttttcaggtacaaaatcaaggatgggaaccaggaagtcggtcatttcatttgcatcttgttcgctgaactcgtacttctcaacagggaccttattcaagggccagaaacgcaaccttcgtatgtgcctcaaatcaccatatcgattaaat

SEQ ID NO: 17465 - DNA, 567 bp, Gossypium hirsutum
  unsure (1)..(567): unsure at all n locations; Clone ID: LIB3830-002-Q1-N6-C5
gcagtcaatttccactataaaaaaattcagtatttaatcgattgatccccaacttatcaacacccaacaaaaaatagtcaatagaaatcaacaacacaccaccataacaaaaatccattttatttttaatattattttatcaccacaatgctgttagtctttgtcaaagacagtatcttcctgcctaaattgctcagaaattacaacccgaagcattatgccataaatgccactctttaacctgagcagggatcagtgatgaccatgttccttggcgtgttgctggtgctcgagatggcgacgctcatttgggagagcgacgaggtaagaaaagaccatcccaccgaaacagacatggtaaagaggctggatcgaatcggtttgaatgtactttgaattgtaattgtccaaacccttttgaaaagctttcttcacgtaatccattgatagcatcggtttcacgtagttagggacttccttcactttcatcccttttatctcgctataaactttcctcattgccattttctgcaaaattcaatcctaaccctagctntgattcccccc

SEQ ID NO: 17466 - DNA, 445 bp, Gossypium hirsutum
  Clone ID: LIB3830-002-Q1-N6-C7
attatctaactgtttttttcacattttttttttttttaacaaacacaaacttttttaaaactttttgcgttcacgaacagacaagcggaaaaataaacaaacgaacggggggaggaaaacttttttttttgactcgaggaaggaaaaacccaaaaaaccaggcttgcgttaaaaacaacaccaccccccccgggcctttaaaaacaaaaaaccgacagaaaagaaaagacccgaaagaaaaaaaattgaacacaagcggatcagcaaccaacccttgtgacctgaaaggggactcaccaacggggggggggggaacccaccccgggaaagaacaaaccagttttctttaatccccctgcagagagaaaaacaccattccaagactgggtgctaggcgggcccacccccatttgaatgtggaaagagggtttatgccccgggggaa

SEQ ID NO: 17467 - DNA, 571 bp, Gossypium hirsutum
  unsure (1)..(571): unsure at all n locations; Clone ID: LIB3830-002-Q1-N6-C8
aaacttaagaggctttaaatttggagtagcaatatttttctttttctttgacgtaacagattgacttgaatcgagaaaataagccctaccaaaattttgagttaaaaatgaccgaagaaaaatctgctaaccaaaagagaagaggaaaacaatcttttttctagcaacgcttgcaaaggaataggaattaatcttcaatcaactcaggcagatttaagcttggcagatgtagaagccaaatgggaaaggactctatggccaaccaacacaaggataactcccaagaaaccaagtagtttcagtgtttggaatagatccaacttcaaccagaagagcacatagagcgacagaactgctccaatactgacgtggaaaagtgtggcaaacgtggctggtacagcattggaaggaaagttcttcaaattcactcccaatagtaatagcccaatcaagaatccaagcaatggcaagaaggtaagacccaggaaagcaagagaaagctccttagggggacgcttttcangagccctgaagatgtgagttatttctgctttgggcccatatcttgagt

SEQ ID NO: 17468 - DNA, 597 bp, Gossypium hirsutum
  unsure (1)..(597): unsure at all n locations; Clone ID: LIB3830-002-Q1-N6-C9
aaaaactatcacataattttcagtttgcacaacacaataaatgccactaatggcagagttctatgctctaccataattcttacagttgatcaacattgcgatctccaaacaatcttgcaaaatctaaagaaaaaaatggagatatacaactccaatggacaatatagctgcatatatcacactcgagagctaactcttcacaaatctcaccacatatagcacactccaggtaatgatacttctttctaacaaatgtgagggggtgtgagtgacccttgtacctgtacgactttccagccttgatgaatggatatttcccgagaacacatcccgatgaatggaagtatcacaaatggagcaacaataaaaccatttattcggatctcttcgttcttcatagatatcacaatagtgctgctctgggtaatcgctttcatcacgaaaagtaagtttcaggaagtgtttatcacacttgtgccgcacctcgttcggaagtgtaatgcattcgaaatgcacagcatacttgcaactcttacatctgtatccaccataaacccatnaatcacaagcattgcatttccctttgtatttggaatc

SEQ ID NO: 17469 - DNA, 495 bp, Gossypium hirsutum
  Clone ID: LIB3830-002-Q1-N6-D1
aaattaacaatacatgcaatatcattaaagtaaaatacataacataagcttcgttaaaacataaatcaagccaagtgacatcaaaatttaaaaacaacattcaaaattaatttcactacaacataaaatataacataaactatgatcattcattttttttttgtatgcaaagagattcaccattggtgcatggaggaatgcacgcacattattcactcaccatctttttttttattaaccatataattaagatataccatgaaattactgcatgatgatggcacatgcaccagtgtcatatggttcaaggcttagtgcccgagccagattgagtaaacatgtactttggccactcagagtactctgcctttttctcaggacttttctactcttctttttgatgcttttggaactcatgtttatgttccttaccctcatcttgttcttccttgtattcgggtattttcggatattggacttcgagtttctcatgct

SEQ ID NO: 17470 - DNA, 595 bp, Gossypium hirsutum
  Clone ID: LIB3830-002-Q1-N6-D10
aaattaacaatacatgcaatatcattaaagtaaaatacataacataacataaatcaagccaagtgatgttaacattagatacaacatttaaaattaatttcactacaacatacactataacataaactataaccatttagaatttctatgtattcacgtgactcaccattagtgcatggaggaatgcacacacacatttcccaatcaccactccctctcttcactatatattacgatataccatgaaattactgcatgatgatggcacatgcaccagtgtcatatgattcaaggcttagtggccgagccaggctgagtaaacatggacttcgaccattcaggcattttagcccactcaaggtactctgcctttttctcaggtttcttctcctcttctttttcatgctttgggaactcatgtttatgttcgttaccctcatcttgctttttcttgtattcgggtatttccggatattcgacttcgtgtttctcgtgctctttaggcttttccaatttagggaactcgggtttttctttctcgaactctacgtgctctttcgattcgcgtgattcggggtactccttatgtttatgt

SEQ ID NO: 17471 - DNA, 562 bp, Gossypium hirsutum
  unsure (1)..(562): unsure at all n locations; Clone ID: LIB3830-002-Q1-N6-D11
ccagagaaagctataaatatgctttatatatatccaatgaaacagtccgtaccgtatcaaacatataggagagaatacattaaaaagctttcctagccgggtttaaaactcaataaaatctcaaaacataagtaaagatggatacaataggcaaccatatgctatagatgaaagcaggatgcagctccaccgctaaaaaaaagcctttnctaaatcttatgcttaagaactcaaataaaacctgcaaatgcaggaaataaggatattatcacacaaactctatctttattactgatagtacaatagctgctgggcagcagcaacattctggaacccaccatcatatatagcctggcttgctccagcagcacccactcccattgctgcttgcttcaaaggatgctgtccctgagggtgcattagagcatgaacgccacccattttgctcatggcaagttgcctttcataagctaataggtcaatcgctgaaaggcccggtaaaggtgcagctgcaggtgggggaagtgggtttgaacttgtccccggtggtgtaggcttgctg

SEQ ID NO: 17472 - DNA, 571 bp, Gossypium hirsutum
  Clone ID: LIB3830-002-Q1-N6-D12
gttgtataatagcttacaaacccaggattttattgtgcattatgatgtaccttgcaactttatagggtgaaccattcttgaaggactgtaatgagaagataaatctatatagcttatgatttctgtttcggcaatcatcataaaaaaagattagtaatattaaggaacaaaataaatgatgaaacattgcctggtctaccatcctacccaacctatagtggtaactaatatattacccaacatttgtaatcagttcatgtgtggagtgaatcatagcccataccttgtgcaaaagcaggtcccaatctttacactcgcagaaataattaggaccgaaaataacatcaagaagaaccaccctcttgccaaaacaggccccgtcttgccggttagtaggctagccatcggcagaaaactggaagagtttatatcaccttgtggcaagctaaaagaaagaacaatgttgagattcccatttttgccatatgaccagtccaaccggttgccagaagagttgtgtctgttattcttatcatgccagccataacatgaacagaactggaagcatgtg

SEQ ID NO: 17473 - DNA, 456 bp, Gossypium hirsutum
  Clone ID: LIB3830-002-Q1-N6-D2
agtataagcttggttttttcgtttataatgcggaagaatacatcacatgattgaacatgccttcgggttttcctcgctgaacatttcaaaggttttttttttttgtgatgaataccatggataggacgagtacatgtccatatcccacctttgacgttcggttgtgtgacccgggtgcatttattcatacaaatacggggggggggaggggtaataggatgcaatataactactggttggataccccatgttgtaacttgggaggtacaccgggggggcatggtaatacgtggggtactcgtacattgggtgctaacacggtgggctataattggctggggatggcatgggaactgaaccatggggtccctgcactttaaaatgtgatccaatggatgcagggactggatcaccaggatgctgatcaccaccctcattaaggatagctttttgccc

SEQ ID NO: 17474 - DNA, 568 bp, Gossypium hirsutum
  unsure (1)..(568): unsure at all n locations; Clone ID: LIB3830-002-Q1-N6-D3
gggaaagtaaaactgaaactgatcgtttctttatttgaatgtctgaagaaaaccaaacatcatcattgtcggaatacaaaggaacgaacagagcagaaaatttagacacacacagatagccacacagcagtatataactaggcaaaagttgctgtttcccctcaacttcacgcaggttttgatatatggtaattgccaacgcattttaggcctctacctctccttcctaccctnttncccctcgtactcttcctcatcttccacagttgcgtcctgatattgttgatactctgcaaccaagtcattcatgttgctctctgcttctgtgaactccatctcatccattccctcaccagtataccaatgcaaaaaggccttgcgacggaacatcgctgtgaattgctcgcttaccctcctaaacatctcctggattgacgtggagttccctatgaaagtagaggacatcttcagaccccttggtgggatatcacaaacactggatttcacattattgggaatccactccacgaagtaagatgaattcttgttctggacattcatcatctgt

SEQ ID NO: 17475 - DNA, 652 bp, Gossypium hirsutum
  unsure (1)..(652): unsure at all n locations; Clone ID: LIB3830-002-Q1-N6-D4
cctagaaacttcatcattaaatcattgaaaacaacctcaaattcaagacaacaatacattttaatcaatctgaatacaacattttancccccaaaaaaccatatcaaacatatatataataatcatatggcatttattctttaacaacacattgccctacatttgcagctaaaccactccaattataatatgggatgttgataaatcccccccagcccctcaaatttacagctgattcaacccgattaattattcctacccaatcctccatcatctaaaatatgaacaccacactgtcatgaaccctagacttttggttttgagccacacattcagagatccacatcagattcctgatctcttgctctcttaatctcatgtatgcaaagaaaacaccataatggaactgttgctcaaaagctaggcaaagccttttcacttcctcctcgtaaaatgccttgtcaagcatctggctctctccgtaagatagtctggagaaaattgattggtagggaggatatttttccatcgcagcacggacctggtcaatatcctcacacacagcaagttcctcatggccatagggataaagcagaccaaaattcgagtataatttcctccgatcatcacgcgtaagttcagtgccaatgct

SEQ ID NO: 17476 - DNA, 538 bp, Gossypium hirsutum
  Clone ID: LIB3830-002-Q1-N6-D5
gtaagggcttgttgagcacatgttttattttaatgcacagaactaaaacataatgaatttctttactttagaagaatcgattctgtgttttgaatataatgatgccaatggcaggcaatgaaaagagttgctgggtctggaccagaggagttccccctcggttttcacgggcgaccatttccgatggcttttacagacagttctagcctcgcccagcctctccatagtacccaacttgtaatcaggcactgaatcccagaaagacattattttctgctttgctttcagtctcagtccatcaattgttccagggaaagaagcctctatagcattcttaaaattatcatacaagtttattctgtctgttgtcccagaaacaagcttgctagcattcggcttcttaagaaaatcgagaacgttcaataaatttctcctgctaacatagttctgtgtaatggcaacagattcttctaggttaatcactagatgccaccatccatgttgcacaaagatcacttctgcagccttacaaatacac

SEQ ID NO: 17477 - DNA, 574 bp, Gossypium hirsutum
  unsure (1)..(574): unsure at all n locations; Clone ID: LIB3830-002-Q1-N6-D6
aacttcatcaggttcaaggctgactcgaaatctaagccataaaaccaggtacaattgaagtttagcagacaaaaatgcctttgatagcaaaactgaaattatgaacgtgtacataagattttgacaaggatactccattacttatttcccctcgcntttaaaatagtatacttcccctactcttcatcatcgtcatattccgcccccctgctctcaaagaataaaacgaccagattctcagtgtagtgcaaattatgggaactttatggtttcaatgatgacgatgatgtttacttctgcgctctaaacctgagttagaataatcttcatatccgcatgatgatgaaggcttatgccgactcttttcacctttaagatgtctataagcatcatcttcagatgaataatgatgcttaagtcggtacttttccctcctactattatgcctaacaatgtctgaatcttctgagttgtaaggcttttgcatagtctttttcctaggctcatgcctacagcagtctgagtcttcggatgaataggaatgcttgtttttgcttttcctatcatgcctatg

SEQ ID NO: 17478 - DNA, 555 bp, Gossypium hirsutum
  Clone ID: LIB3830-002-Q1-N6-D7
atcgttcacaaacaaatacatttaattcaaaaacgaacagttatttacacatataactttaaataaacaaacacaaacaattttaaaacttttagcgaacacgaacagacaagcttaaaaataaacaaacgaacatgaacaggaatttgccctccacgctcgattatttacaaccctggcaaccaccttcttttctacaccaccactctcatcctcttttattacacacataatttgacagaatagaaaagaaaagaaagaaaaaatcttgtagacttgaggatcagcaaccaaccagggtgacctttttgctgccttatgaaccatagaatatagaacaaaaaaggggaaagaagaaaaaaagaaaactaaaatcctaatgcagagagcaaaacatcattccaggactttatactatgctggttcacctttttttgttgtttgaagatttgtttatgatatgggggaagtaattgttgtgttcattgtcggcaagaggtgaaacgtgaatcttgtccaatagccacaagcattcggcatgcagcttcaagcaac

SEQ ID NO: 17479 - DNA, 606 bp, Gossypium hirsutum
  Clone ID: LIB3830-002-Q1-N6-D8
atgtgattgagatatggtcggatttcagacaaggaatgatttaaacaagaacaagacaagatttttcatcatagtcacatgtaaaaatttctcaaatttttttaacaaaataaattagcgcaaattttaatcatgagagtaattacctcagaaacaggtgagcaacaggagcagcaccacccaatctgctcatacttagaacctggccaacgacccctcctctgtttttcagggatgcccatacaacaaattggatttttaaaaaataatgattaataaacacattaaataaatcatgtcaaccaagacagactgacaggaatcttaattaatagaaaaaaatttaaaccttcacttggagctggaggaatttgacatagtcgatgatctcatcaagcattgaagctttatctgtctgtcaaatccaaatcccacatccattaaaatactaattagtcagtttaaatattcaaattttaattacacactcctttttgtttaaattaatgggtttaatcctatttttaggtcttccactttgttcaaattgaatattttaatttactccctttttcataatatcaggggctaaataattaacataat

SEQ ID NO: 17480 - DNA, 511 bp, Gossypium hirsutum
  Clone ID: LIB3830-002-Q1-N6-D9
atataaatgccataaaaaaagagcctggtaacatcaatatccataacttccagagtgcaattcaatttggaactttagggtcagatttttaatcaaaacaaagcaggtctgggcctaccaaatagcttatccaaattcaactccatttaactactactaccaccttagtttctcgccttaccaccttttccacgggcttgtccgccttctttcccaccacgtcctttccaactgccaccgccacccgatgccctgtttgaattgctctttcccttcaaatcttcaggcaagggaaggatatgatcaatacacttgcggaagctaaaatcatccatagtttcatcatccctaatcacaaagaaacatttactcttccactggggatgattacggatttggaaagctttgacccctccaccaatctttctctcaggctctagatgaccttttttaagcaagtccagcaataccatatgttcatacttgttaaagttcagtttgagtcccccat

SEQ ID NO: 17481 - DNA, 558 bp, Gossypium hirsutum
  Clone ID: LIB3830-002-Q1-N6-E1
aactaaagttatatggtataattaataaataaagtataatttaaaatattcttacaataatgttaaacgtgacaaaacttaaaaacattctcacaataagaaaactaatgtctaagatggcggcttttgcgattgctgaaacatatgcatcatctgctaaagctgtagctgaaggtcatcgtactttttgctctactctgctaccatcgctcgtgcctctgcctctttcgctgcagccgctgcctccctctctgttgcctccgctctaagttgttgctggagttctttatattttcattgaaccttggcaatttgctcaaccgtattcgcttgcatctgagctatctggtctcttaacctctgaacttcagcttgagcttgacttccggaaggcatgtattgctgggagccggatccaaaatattgggtcggggtaataccagatccttgaaatcgaacccaatcgtacctttcaggacccaaaacttcagtgataattctattatcaatgttctcaagattaacagaactatcactcgaagcaatcgcttcatattc

SEQ ID NO: 17482 - DNA, 526 bp, Gossypium hirsutum
  Clone ID: LIB3830-002-Q1-N6-E10
aagaaacaatattgaaaatatatataaataataaaatgtctcgctataacatcaatccataataatacagaaaataatccaaatccaaaacatcagccatcaataatctgtgcaacaaataaaataactacctctctctctctcataaatttatatttttttttttataatataatcactccctagatccactaccacagctactaaaattccaaaccaaattcaaaatcaaatcaaaaagaaaaaaatacatatataaaagaaaaacagagcatcatctgaacaccagagatagcatcattcagatccgaagtctagatccgaaaagcagagccacagcggcggcggcgacggaaacagagacaaatgaaggagagatagagccggcaccagaggtggggctcggagccggagcgtcggcggcaatggcggaacccatgagagcgcatacagcgacgagaacaaccattagagtagacattgaggcagccattgttgttaaaggaatcttaagcgttaaacaaag

SEQ ID NO: 17483 - DNA, 589 bp, Gossypium hirsutum
  Clone ID: LIB3830-002-Q1-N6-E11
tttgttttaataacacaaacatgtgaatctgataaaacgattgcaagaaacagccatttatgtctcagctaaatgaccatattatcccttgtggacatatatccttccacaaccattacctcaaattctcttcctaagcgagacaaaaaagaaagtgcattatttatatgttccaaatccaaggttcgttgctacattgggccatcacagcaaaggatgataactaatgctcaccaataattagaatttgttctaaaacttcaaaatttccacccttaaggtttcgattcgatcaccttctttgcaaaggatggtaaacagaaagcagccgaatgaatctcagagttgtaaaacttaaggggtcgttttgatttgcagcagcactcatctttgtctataggattcaccggatgcttgaagtcaacaagaggcccctcagttgagcaaagcatgaaaccaatcacaccacttgggtatgtaggaactgtagtccacgcatagttaacagagcctttgaagatttgacggcagtttgctacaatatcctcaatgatgtgcatatgtagccagatactttctgcctgagtgc

SEQ ID NO: 17484 - DNA, 552 bp, Gossypium hirsutum
  unsure (1)..(552): unsure at all n locations; Clone ID: LIB3830-002-Q1-N6-E2
ggaaaaaaaaacccaattttatatttcatgttttgggaatagacatatagaccactcaatcacatactattagctacaatttgatagtaaaaagaagaaaaagaaaatctcaaaatttatacaaccaacacaaactgctgtaaaactccacaattgtttttttcaatccattgtgggattcacgcaaattgaaataaatccgcatataccagagtttgtttcctttattcatgatgatgttgcggatgaaggagaaacagtgaagggttcttgttcttcacaggtgagcatatcatgaggaccagcttcttctcggccaactcccaaaaggtcaaggtaataaaggtaatgagagatcatattgttcatggaatcactatcaccttgaccacaaacttggtcaccataaagaacattcatggtggttccaaaacctggaaccctcttggccaaggtgtcgttcttggttggtttccagttgccaacgaaaacgtcatgggctgagggttggtgtttcttcaccggcgtcatccacctncacattgctgtctg

SEQ ID NO: 17485 - DNA, 562 bp, Gossypium hirsutum
  Clone ID: LIB3830-002-Q1-N6-E4
aataataaaagctatacctgagcctggccatcatgttattcaactatcactattggcttcaaatacatatgatcaaataatgtaatagcaatgggaaatcatttgtatctcaaaaattcccccccccctcttctatgcaacggatagaccagattaactcctttgaagtcggcgccatctgagatctgcattagttgtttgctgtaaaatgttgcgaacatcatgaaagaccctcatctaagaggctccatatccatcacggtgcgccttttgccatctccatgcagtctttaaactctcctcgagatcagtgtgttgagctgtccagttcagttcacgcctgatcttagttgggtcgctaaatacttcagcgtaatcaccaggtcggcggggaagataatcgacttttatatctacccctgttgctttcttacaggcctctacaaactcttttaccgatctaccttttacagtgccaacattgtagattcctactttactgggttgtgccttttgaagagctttacatgagcatcgactaagtcagtaacatcgatataat

SEQ ID NO: 17486 - DNA, 584 bp, Gossypium hirsutum
  unsure (1)..(584): unsure at all n locations; Clone ID: LIB3830-002-Q1-N6-E5
aaacaaaaggactaagatttattataaccaagacaacatgcatacttgatactgcctctcctaataaccatacaagcaaaacaataaacataagcaaagaaaggtggtttgggacccaagaaacccatccctttacagataacagatgaccctnaaataacttcccacaatggaacttgaagtatgtcactctttgacatatgcaaatgcctgttaacctagccacattgcaggactactatcggtgggcctccatcagccacattactacatccttattgacctacatagaagaaaactagttgacttgacatgcaaacttatcaaactgtagccatttgaaacacacttccattgacacccgcattttcatcacaaaagctttattatttactcagtcttctctgctggatcagcttctgtttcaactttctcctccacttcagctggttttgcttcttcttccttcttaacttcctctttgggtgcttctgctgctgcctcactagactctgtagtttctttggtttcaacggtttgttcagtggtttccttgatctcctcggcaactggttctggcattg

SEQ ID NO: 17487 - DNA, 576 bp, Gossypium hirsutum
  Clone ID: LIB3830-002-Q1-N6-E6
aatacatcaagaactcaaggagggtggaaactttatatcataaattagtcttgttttgatagcagtgtactgaataatacatcaagacctctcaaaatagatgacaagaatggcaaaataaagtggaaagcacacatgaatggcttttttttatttgaattcatcgaagactaagacattttgaaatctttagaaccggaaattatcttcaagttcaacacctttttctattctagagtatggggcaataattcaagtgttaaatcttaagactaaattttcaaacttcttaaagcagaagtaagcaaaccgagcttgtctgcggctctttgcttgtattctttctctaacacttttgctgccaaagactggagctctggactctccttgtcttccttgctccttccttttgaaagccgagctatggccgaggtgcacaagcatattccgagaagtgctcgggtgttcttaccccccgtcaaatcaatagtggatgcataatatttcttggcagtttgaatgttttctagtccaccgagtgtgtagagtacatcagcataggtcaaatgatataat

SEQ ID NO: 17488 - DNA, 574 bp, Gossypium hirsutum
  Clone ID: LIB3830-002-Q1-N6-E7
aagatcccaaacgatatccgaaattgctaagtagctagtgcagagtacggtgccaccagacttttaatacataacacacaaaatctgtaacttattccgattctttcctggcaattcaactcttaacagctggttttgaatcacaaaataatgtcccctcaattgcttctaggttcccaacacaaagaattgcacttactactacaataatcacatgccccgaactttaatgaaacgggaacccgaagtaacatatgcaatcatagagataccgtccactgagatttgattctggtcgaggccatgaagcagcgttggcaaataaaacaacctacaggtgacttatatgaaaattgacatatatgtagataagcaaagagcagactagctttcatcagcttagcttgttgcatcacggctgtaatactggtcaagtgtctttgcaggtatacggtggaggagttcacgtgggaagatacgaagcaaagtccacgctaaatcaagtgactggaagatattgcgagtatcataagcaccttgcgtcacgaattttctctcaaatttatctaggaac

SEQ ID NO: 17489 - DNA, 382 bp, Gossypium hirsutum
  Clone ID: LIB3830-002-Q1-N6-E8
ggaaaaaaaaagaggaaattttcctcattttttgaaaggaaaaagaaaaaaattggggaaaaaaagggggaaccccccccccccccccccggaaaaaaaaaaaattaaaaaatcaaaaaccaaaacgggggggggggggaaaccggaaaaatcgggacgggacccggggggggaacaaattttcctaaaagggggggaaaaaaaaagggggggaaaaaagggaaaaaagggttcccgggggaaaaaggttttcccgaaaaaattcaaaaaaaaaaaaaacccggaaaaaaaaaaggaaaaacggggggggcccaaggggggggcaaaccaaaataaaagggggggggccaaggggcccttttaaaagggggaaaacgggggg

SEQ ID NO: 17490 - DNA, 622 bp, Gossypium hirsutum
  Clone ID: LIB3830-002-Q1-N6-E9
gatgatgagaaagggcattctataacaaccaaaagcagagtctggtaataattacaagatttcatccccaatttctgcacatatagtgcaagcaataacaacagatatacagttatacacgcctctaattctaccaaaagatatatgttgtccatatttattaatttaagcatgttaaagcttgaacatgtctaagaaataggggccaaccatgcatttttttaggcctttcctatcagagattaattcaaccaaaattgctctagttttccaagggccgactagtctccgtgaagttcatctgcgggtggagcaaatctcacatttgctggccgtgctactactacagcttcatctgcaaacatcgctttaataaaggatggagtttttaggggtcgacgtccggtcatttgtggatatacatcttcaagaaaatagtaggcatgaccagcaatcattcccaggagatccacccaagcactagcaccaacaaggacagagaatcccaaaagcacccagggtaaataagctgctgtaaaggtaaaaagacccagaaaactcatatgtataaaaggattctgtttgctccacacataaaccatcatgaatgtcaatgaattgc

SEQ ID NO: 17491 - DNA, 562 bp, Gossypium hirsutum
  unsure (1)..(562): unsure at all n locations; Clone ID: LIB3830-002-Q1-N6-F1
aaaacaaaataaaaattaacctttgaattataaggagaatcaaagagagtaaataaaaaaaaaggaggttcccaaagactcgtggaaaaggagaatgttagtcccctaaagctctaaacaaatttgccacccctaatcatccttgtggtggcaacaaccattanttgagaatatcataaacaaacattgtactgtaaaagaaacaaatggaattccaactttcacaaaattttatacttcaataggattttttaacattttacctcaactgtacaaatccccaaaacggcctcaaaatgacccttaagccttttaagccactctttcatgcttagacatttgggatgggattatgctttgaatcttccggtactaaacattccatatgctcgcaattacccgaagtactgcagcatgctgttaacttttcattggtctccacatcggtttcctttctactatgttggtcattgctagatgtttgccatgaaagctgtaaattatgtgtcttccagcatttaccatctgcataagccttctctgcngagtggtgtgtgctgta

SEQ ID NO: 17492 - DNA, 595 bp, Gossypium hirsutum
  unsure (1)..(595): unsure at all n locations; Clone ID: LIB3830-002-Q1-N6-F10
atatcattagtaagatgaaaaaaatatcagctggatccttcataataaatgatcatatcccaacgacatttacgcaccataacaaagtggaacataaaagagtgacggggttcatccagctccttcatacaaaaactccgtacttagtcttttagcaaaggcccaactgaacccccaactacaccngattcccctcctacattgatatccaaaaaccaataccaaaactgctattcaccaacaccacttgtgcaaacttcaatcagaaaaaaccagcggatatatagttccaaaaccactcaccagtacaagcgatacaacaaaatttagcatttggtgaaaagaaatgcttccctatcaaagtccgagaagctttattttcctatcatcatgacgatgttgacgtgccattattggtctgtttagccacataaatttgcttcatctttgaagtgggaaagttcttgtctccacccatcgattggttcctcccttggaaactcattctacgatgggtcaattcacctgacccattcttttgcgagattgcattccctctcggatgattataccaggaagaatttccgtaatgctg

SEQ ID NO: 17493 - DNA, 508 bp, Gossypium hirsutum
  Clone ID: LIB3830-002-Q1-N6-F11
aatcaacacacaactatatataccgagtctctctacaaccaccagatcttataaacaattccacagttgaataattaacttaaattccacaataggtttcttcattccaaagtaaatttggacttcaaattccatcaatggggttcttcagattcctatttattaatgacatgagacctccaccgtggaccctcccctctgggatccccccccgaagcttgtattaccaactcccccggcattgtgattgccatgcctgtttattccttcatcttgctgctcggaactcaagaagcttgagtatgaggctgatgacttcatagatggtggaaccaatacctgtggaggtatgagttgttgccttttcactggcttgtctggtgaatcgatgcaatcagaaatgacactattgccagaagatgagtgattgttgttggagctgcttcccgtggttgatgttgctgatacaagaccatggaaaactccaatgagccctcccttgcttgcc

SEQ ID NO: 17494 - DNA, 592 bp, Gossypium hirsutum
  Clone ID: LIB3830-002-Q1-N6-F12
gcaaccaaatgccaatttaaattgataatgaccattttaattacagaagccgagaaatccctcctgattaaaacataaaccttcctaatttggaaaacatcatggggatgggcaaaactattcaattcttttctatacctgaaaacccatgtctggctcatgaccatacataccttgcccttgactatggccaggtgcaccaaaagggcccatctgcttcgactttgacctgagttccatctcaataagcctctgcaatgcctcaggatgatggctcccactgccgacatcattacctggaggcattccaagaccagcaaagttgggttggggctgccggtgaccatgccccaatggaaaaccatgcattggattcaattcaggtagcaaaccagccatctgattagttgaatgaggtgccagcggtggaacacagggaattccacgttgcatgattggaggaaagtttccgggtatatgcatttgttgtaacataggatgatgaatcggaggatcaaatccagttagtccactgctaggatgatggagaggatgaagcatatttgcaggtaaatgatgattttgtggggca

SEQ ID NO: 17495 - DNA, 449 bp, Gossypium hirsutum
  Clone ID: LIB3830-002-Q1-N6-F2
gttggttcttttaatgaaaccaataaaaaaaccagggacccgggccaccgaagccaaaagccaggaaaccggaaaacaacacaaaaaaagggggggggggggggaatttccccctcaaataaagggggccccggggaaaaaccaggaaaaaccggacgggacccgcccgccccccaacctttcctaaaggggggccgaataaaacctgggggaaaaaaggggaaaggcgggccccgggggaaaaaggggacccgccacaaatcccaccaacaaaccggacccgaaaccaaaaacgtaaaacccggggggcccaaagggggagccaacccaccctaaaggggaaggacccaaccccccctatccaaacgggaaaccccgcctgcccactggcaaaaagaaaaggcccaaccgccgggagaagcaggcaaccgaacgggccgcgggggggg

SEQ ID NO: 17496 - DNA, 219 bp, Gossypium hirsutum
  Clone ID: LIB3830-002-Q1-N6-F4
aaaccaaataattactacaccatataacaaattatacaatatcatgacaaaccacataataatttccatttgtcgtgtttattacaagaatctttagaggggttgtagatgttttgggggtcctcaaatctcaaattggtccaccaaattcctcattgattattaaggacctaataaaagccgaataggtttaacaaacacattattgtagacccatac

SEQ ID NO: 17497 - DNA, 197 bp, Gossypium hirsutum
  unsure (1)..(197): unsure at all n locations; Clone ID: LIB3830-002-Q1-N6-F5
cgaaacaatttagttttttcttttaaaattgttaaagctataaaacatttcgttttccatttttttatttttttttttagttctttaaaaataggctcaaaaaacgaacgccgttttcgaggagagccgaaagggagttctaccctcccccccaaactggnaaaaagcaaaaatcattcttttgacctttctttttc

SEQ ID NO: 17498 - DNA, 364 bp, Gossypium hirsutum
  Clone ID: LIB3830-002-Q1-N6-F6
ggaaaaaagaaaggccattgggttccctggggaacccccgcccccagggggacgcgccccccccccctcccctcccttttggaaaaaccaacccggcaagccggggccccgaagaagggaccccccaacccccccccccccctgggggggcatcgcccaagaaggggggcctttctgggagaccaaaccttaccgggtccctctttcggggggtcttcggaattttttcctgcggcccccccctcaggggccaatctctcccccagggccctagcccccctttctcttttcccggagcccccaaggggggcagaacccattaagggggccccccccccgggatacccccggccctggggggggg

SEQ ID NO: 17499 - DNA, 587 bp, Gossypium hirsutum
  unsure (1)..(587): unsure at all n locations; Clone ID: LIB3830-002-Q1-N6-F7
ccacgcaattttttatcgtttacaaactgaggaagatgggttacaacctcgaaaccgtacaacaattctatcattccaattgttactacttcggcaaccaattaattcataacatgtcaagcaaagaaaaagaaaatgccgcttctagctcgttttttttttctcttttttatgaataaaaataagactattatagaagtttctttacccacccctcctctcttaaaatgatatgaaaataagaaaatagtgtaagtcgtatttctctcattgtaactctaaagacttctttggtatcgtgcattgggactggatgagatggctcgatgaccgtgatctcttaatataggtttttgtccactcagatctgcacttccatgatatgctctaacttgcgatgaagcttgatggatagctgaatcatcgggattgctgcagatcccaagtttgacaaggaacgttactgcgcaacctttgtcaaggccctcactctcaatccatatgtggcctcccatcaaatntacaaaccttctacaaatggcaagtccaagccccgcaccaccgctatttccactttgaggctgtgc

SEQ ID NO: 17500 - DNA, 504 bp, Gossypium hirsutum
  Clone ID: LIB3830-002-Q1-N6-F8
catctattgtacatgaactaatttactcatattttgagtagagggaacaaattgcaattcgatccttagttccttcacggtacttttaccgtcgatcatacgagtactcaccttcatgtcctctacaaaagaagggaacccacttccgtccgtttgtgacaaaaccgaaaacaaaagagcacatgaaccccttgccccccccccttcttcctggttccaatattgagataaatggttccaatacagacagtgactacaacatatattagtagtctcagccaataatagccaaagtctctggacatgttgatgaatgagcgtttggttaaagtgtatgactgcatcaagaagctagcttgactgcctccagaatctaacacggttcctttaactttggatatctcatcaaccctttcctttgcagcgtaacattgttgagatgttcggtagaaatcagtaagttttcggatggcttcggctgtggttattttctcaagtggatca

SEQ ID NO: 17501 - DNA, 605 bp, Gossypium hirsutum
  unsure (1)..(605): unsure at all n locations; Clone ID: LIB3830-002-Q1-N6-F9
cccaaattcgtaaaaaatcaactcagatatccatgaatattcaaattcgtactatcaattgccatccgctaggtataacctaaaagtcacttgcggcacaatctagagactgaaaaataatctacaagctatttcatggaatgaacggaaagtcccctccacattagcaaacttcaaagaaatttaaaaaggacttttaattnaaaaacccacctttttcttttgttaaggagaaaccctaatcatggatttatctaaacaacaacaaaagaaaaactcctaaaactttccaaaatatattcaataaagcccatccttaaaccacatacattaggacaactcggtaaaagatagacacagagtcctgcaagcaacgaccgaaacaaccaaagctgccaaatatcagagaagacatcataagctaatgtagaagtttttcataccttgatcatcgagtaattcagtcttagacttccttatttaggcaaaatgaggtcaacagctttgtatatgaacatcatggtgcaataggctcctgtacaaagtccagctgtccttgctctccatcactggctgttgatcaatgtcaggctgactttctcctg

SEQ ID NO: 17502 - DNA, 579 bp, Gossypium hirsutum
  Clone ID: LIB3830-002-Q1-N6-G10
acggaatgttatgttatatttgatgaaccctaaaatgaaaaccaaatggcagaggagactttatatacatagctgattgaatgcaaagacttgatatccaccagagcgctggtgaactatcattattttaatatatatagacccacgcatctttttttttttgcatattactacttcccattaatttatttcagatggaagatacgagagaagaatcatcttctgtaattctaagattcacagactcttttaacaaatcaaatgaagtgaaagaatgtggtcgcagtagcgcactcatctcttgcgcatcttccagcagtgtttgattaggagcgaccttctttggctccttgaaggaattctcatccatcagattagcagacgtgagagtggtctttgttgatccagacagctttacagaatttggatccaatccatcaacagaaatttggaggttgactgaattgctcccaaagtttacaacctttatccttatgtaggtttgaccatcctctgaatttttccaagtaattgcagatgcaacaagggaattagatgaatctttttgcagtgttgcat

SEQ ID NO: 17503 - DNA, 620 bp, Gossypium hirsutum
  Clone ID: LIB3830-002-Q1-N6-G11
aataactaccaatcaccaaatgtttcttcaatcaaaaaacaaacaggtccttcaatgtcttaacacaaaacatagttctgggggtccaacaaacaccaaacctgtcaggttaacaactaaatataacaaataacaaagtctagcaaattaattttttcctttgctaataccactattactccttgcttgtggttaggacccaatgcaacagagttgagagagtagtggttgcaggtgcttcttgttttcttctttaagttaaacccaaaagatactttaaaccaccagtttatttggcacccaatggactaccaggcagggtgatataatcaggattaatgaacttctggaagtgaagcctactcctgttgctgatagttcttatcatcattccgcaaatattcatttctaccattcttcttgttattattggcagcatctttctcaaaattatttgcattttcctgttgctccctttcacggttccattgctcaattttagcacgtctctcctcactgccttcacggattgggctatgattcctctttcccccagggcttctgctccgacctctccgatgaccaggacttgtgcttctgtgtcttctgctccggctttc

SEQ ID NO: 17504 - DNA, 524 bp, Gossypium hirsutum
  unsure (1)..(524): unsure at all n locations; Clone ID: LIB3830-002-Q1-N6-G12
gaaaagaagatcttcattccatttttatgcttttaagagaacagtaacaacatcgatcaaaaacgagagaacccaaaccaaacagtaacagagtaactttagaattaccaactaccaaacccaaaccaaacccattttttttttggcccaagcccactttgaaaccctaaatttaagacctccagttgccttcagatgcaccgccgccttttgagtaacgagatccgccgtcaccgtatcctccttcacggggtccacctccgtatccacctccaccataccccccaccgtttccgtatccaccttcacggggtccgccaccatatcctccttggcgaccaccatatccgccgccgcctccaccgggggtgtaaccaccgtttcctccttcaaatccttcgccaccgcctccacttntgcgcgattgggcttcgttgacagttatgttccttccatcaagattttgaccgttcattccttcgatcgcgtccctcatagctttctcgtcacggaaagtaacgaat

SEQ ID NO: 17505 - DNA, 582 bp, Gossypium hirsutum
  unsure (1)..(582): unsure at all n locations; Clone ID: LIB3830-002-Q1-N6-G2
gctctcaatcacaaatatcaatctatcaaaaaaacaaaaaaaacccaaagatgtatgaattgaaaaggatctgttagataacagtgcatcccagcaaacaattatacccccacaaaaaccactcaggcattaatgaatcaaaagctatagaaatcaatttctatagttcctccttgcttccttcccctcaccaaccccccttttgtttttgctccttttggacttctccatacccacgtacagatgcttgcattctttgatattatattttttatgacataaaatgactaactgccctttccattcatgacaccaacttctgtattagtaagtgctgccttggcctagctggtgaaggtggataagaaaggcgtttcttggcagacgcaattggtcccttctcaggtgttccattggcttctagtcccaacggactttgcaacttggtcttagctcttgtggattcagtcggtaccatgtaacttggaagcgatggagagcttcctaggccctcactgtcatgcactgaggagcctgcaatgctatgcctacngtttctttctgactgaatgctcaccatgc

SEQ ID NO: 17506 - DNA, 557 bp, Gossypium hirsutum
  Clone ID: LIB3830-002-Q1-N6-G3
gattaacaacatagcccatgttaaatttttaatcatagcagcatccatttttcttaacagtaaattacaaacttagccagtacttaatacttatgttgcgaaaaatggtccttggttcgaaccaaagcctcgaaggacttgaagagaacaatactttcaatgtagatgacacataaaagccatagtgtctttgctataatatacttttcaggcatttcttcttgtttgcttctaatgaaataaaagaaacatcaagtgttttattacagctagaataaaagttgaaacttggaaaatatatgaacaattttccctaaggtgagcatgatatcattcctctcttttttcttcaatgacaatctagaggggcatgatactagtgagaatacctgaaagggtgcacaaggagattgttgcggttcttgatggaaccgaattgtgggcactgatacacaagagtaaactgtttgtagataccgaaatagtgcggagatctccctcaagacaagcaaatccttactagatgtgtagtgctgtttatttccttttcccgctcc

SEQ ID NO: 17507 - DNA, 544 bp, Gossypium hirsutum
  Clone ID: LIB3830-002-Q1-N6-G4
aaggctgatcagatttttaacagaataaaaacaataaacaccaacaagatgcattcttgtttgagtttgacatgtataatagagaaggaatttgtttcttttgttctcctttgatcatctacatgttcatgccattgacacttgggcttttttttggtgattttacttaatttggcagagattagcctctaaatgaaaactggcattgaaattattaaataacactatgctaattcatccaaaacacaatcatttttctcaaaatatatattttatggaacaaacaacagattaaagtcccgtgaccaggtggggttgcagttgtagtcggaacaaggtaacaagaatatcctctcagctggaattgtcatacattaagcggatattacagcccttccgagagccaaacatagctttggcgagaaatggtgagcatcgaagtcatcaaagccgaagcagtcgccgagtgatacggcagcatcgattccaagcagaaactcgcttcaactggacacctgcaaatgcagttggaaagaggaatcct

SEQ ID NO: 17508 - DNA, 565 bp, Gossypium hirsutum
  unsure (1)..(565): unsure at all n locations; Clone ID: LIB3830-002-Q1-N6-G5
attattaagctggatttgcccacatggtggactctttatcttccatatctacttcacacaaaaccaaacccctctcaccccttcatatctcctccccaccaccgccaccaccaccgtgccgccacattacacacaattgaaaaaaaaaaaaaactttttcttttagagggtatcagcaactaaccagggtgaatcattgaatttcagcatgtgggaatggaaaatattatatattttttggtaaccattttccatatcttcccatgtttagctgcttgatcccaactttaaaaaagaaaaacctaaatcctattgtagagagcaatgcatcacaccatattcaaagagttttaaactatgttgcttcaccttccaattctttttaagttttttgtttatgatatggggaaatgatggttgtgatttttatatttggcatgtgctaaaatgagaatcttgaccaattgccacaagcattctgcatgcaacttcaagcaacttgcctcttctgggtttcgctgtagcaactttgatagncttcttttcttctttagttttctcttca

SEQ ID NO: 17509 - DNA, 575 bp, Gossypium hirsutum
  unsure (1)..(575): unsure at all n locations; Clone ID: LIB3830-002-Q1-N6-G6
gcagtgccaatatgttacataaaaaaggaaacataaatatgcaaatacaagtcatataaacatttttttagttaaatatagttacatcatttacagatcaatagggtgaattgagctataaacaattacaacaatacatacatagatattttcatanttttgccaatgttttacattgaagattaaagatgcagaggagagtttacccaaaagttttctcagtgctgtaacacatgtagagaaacccatcatcatctttgaaagaattatagacacaccccatgagacttgctgtttgaggtaatgtattgtgcacaaaaacaaagagagcttttccaggactcaaatgtagcctgctacttaaaatgtgaatgaactgacccaccaacatgtctcgaggaaccaggatcttattcttctctataactgggaggtctgtccttgaatacctttcaatgatcacaggaattcgatctgggtatttggctaatatagtttttgattctttcagtcgttgctctagtgattgctcctttagaaaggctgacgcttcaccattgttattatatcttttg

SEQ ID NO: 17510 - DNA, 565 bp, Gossypium hirsutum
  unsure (1)..(565): unsure at all n locations; Clone ID: LIB3830-002-Q1-N6-G7
gatgataaattcactggtttaagttatangaaagaatgcatgttaatgaaaagtgcgactaacaaatccacacccaccttttaacaagtttttgctaacgtcacaaaactaacaactaataaaatgcaccagcccaagaccatttttcccccctttcttttttcttcaccatacttgttcagacgaaggaaagaagagggaatatatgcagcaagattgtaggagatagttgcttctgactattttttcatgatatatcccataattataccgatcaagccgatgaggatgacaaccatgaatgacacgccaccgccacttttgctgctttgacgcttcaagagttccagttcttggcgaagcttgttattttgttgaattgcactatttttttttgcagtcagctttgttataagagctcttgcctcaaaagatttatcttgagcttcaagcccctcagagaattgttttgcagctgcagcaaactcagcagcatttgcatgcccattgtcagaagcagaaactcttggtggagacccttcttctgaaccttcacgtacaggtg

SEQ ID NO: 17511 - DNA, 595 bp, Gossypium hirsutum
  Clone ID: LIB3830-002-Q1-N6-G8
aagactaaaaacagtttctttattaaggcaccagaaatatcttacagaaaacatgtcccgagtacgaactccgtgaatagctttcagttcacacgaagcagcacacataattttcaccatcatcaatataacctattcactgtttcttctgttttttatttgagttccttcaccctctcctctgtagccttcaacgctttcccatatttgcttatcaattcatcaacctcttgaggagtaattataaatggtggagacatcattatgttgtcccctgcaacacgtactagcaacccatgtttctcacattgtgctccaaaatatgtaccaaccccccattcaggagggaatggatcattaggcgacttgttgtctgtaaactcagtaccaagaatcaagccggtacctctgatctctccaacaataggactgtcagaaaaggattttagaccatcttgaaacctcggtgaaatgctcttcaccttctcaacaatatttctctccttgtagagcttgagtgcaagtttgttgctttgagaaataatgacttctgaaacttagggctcaccatgactgctccaatgggcatatatgc

SEQ ID NO: 17512 - DNA, 491 bp, Gossypium hirsutum
  Clone ID: LIB3830-002-Q1-N6-G9
gcaacagtcaagaacacacttcatttcatcagtcatagtcatagtcttcagataacatcgaagacgctgttattacatgcgagccatagtaactgtagagtgcatttatttacatcaccattttttttgatccattaactggaccccatattcaacttctgtttgattaacgataagaccctccccacttcttcccttgcagctttgcaccgagtgccctctcgagtttacctataatctgttggttaggaatagcttttccggattcgtactcttgtataatctggggcttttcattgatcatctgagcaagttgagactgggtgagtttcttctccattcgagcatgcatgatggctttcttcagttcagttggcactctttcatgagcaagattttcagtttcctcatcaagtttccttgtattcaaagtagtgctactcgatgctgccttgttcgccccagcattcgatttcttgacggattcgatc

SEQ ID NO: 17513 - DNA, 547 bp, Gossypium hirsutum
  unsure (1)..(547): unsure at all n locations; Clone ID: LIB3830-002-Q1-N6-H1
aaatgtgttattatttttatggtttaataaaacatatcttgttcaagttaaaacttgtcacattaacataaaatcgaagtgatatccacagaaatgaaacttgaaaccctaataacattcatttctattttgtttgccttatatcaaactttnctcctttacaaaacttgttcctcaaatccagctctcgggccagatgcgttttgctcaggtagaatctttttgtattcagcaagcagtttcggaacatcattcatccgtagctgagaaacatttttcaagtgataaaacttgtaagcttcttttcccgataaccatgaatcaatagactgaaaatcagatccactatttgctaaatgatgacgcgaaatcagtcgttgatagtcacgaagcaaaggtccaagctccttcagtggtattgaacttggcgtagatctccgccaatgatcacgaagcaactcaattgtctgattgagcaaaccctggttgttactaggaactctntctccaatcaaccttgatcctagttcaatgaattctttgtctt

SEQ ID NO: 17514 - DNA, 589 bp, Gossypium hirsutum
  Clone ID: LIB3830-002-Q1-N6-H10
agaccaaaagaagttgcagactcatgttaaagcactaaaagagagcatgggagaaacaaatagcagagtttaaaacattcatatgtttttcagtattcaaacatagacaaattcagacacaattacttatacagtcactcaaatttaaaatttattcttttgtctacaaaaaaacacataaaaaaggggtacatactaaaaacctctgaaagcagtgcaggcaaggcttaagcatgcatatagcttggtttttacttcaacttcacaacagattttgaccaaattcatgttgctttatttacaaacactagttattatggaaagttcgctcagaaaacaccctccgccatggtagggaaatcatcaaagttccaaagatccatcgggtttccaccatcctgtgttgcatctccattgaggaaagcatcaatagtggcgtcccagtttccttcaataaatggcggcatttggaagtatttcatctggttgtccaaagccaacagctcgtccgacaaggtcttcgcggagttgtcttcggcaggcataacattgtcgggacttggtttcagcttcttgctagggttagcat

SEQ ID NO: 17515 - DNA, 536 bp, Gossypium hirsutum
  Clone ID: LIB3830-002-Q1-N6-H11
aaattaaatccgagatttcatagaacaaatggctcaagacaacatgggaaatgagacacttttgagttttctacccttaaaactgtaaccacaatgaagaaacagccaaacttcatgttggtttacatgttccataagcaacaaaaacttttttatattaaaacaacataggagtagccaaaaagaaaaaaacaggggatatattttttaaggactcgttgccggacagccagccattttcaatggtgttttaagcatctttcttctccacgagcttctcaatcagatccgctgcatcttgaacggtgacaatgctttgggcactttcttcttccacactgattccgaactcctcctcgagtcccatcacaatctcgaccgtgtcaagagaatcagctccgagtgcagcaaacttagattctccggtaacagaagaatcttcgggtagtgctagttgcttcctcactatgctacaaactttgtccaccgtctcgggtttggccgcacaagaaacccggaggcgcataggtcccggt

SEQ ID NO: 17516 - DNA, 541 bp, Gossypium hirsutum
  Clone ID: LIB3830-002-Q1-N6-H12
agatagaactggcaaaaagactaaattaagacttcataaatcatccaaaacttagagcaatcaaagtacatcaacgagaactatgagaaacaataaagcagataatgtaaactgtcaataatcctatatgtttatgctttaatacaaataacctttttttttgagactgaatcccatatcgtcatcagactcttcttcaggttcaggtcccttttcctcctcggcaggggcagcagcaggagcagcaccaccaccaccaccagcaacaggggcagcgacaacagcaaacttacttggatccgccaagtactccttcactttatcagcctgggggaaggaatactcagttgcaacagcaacggccaatacattcttgtagccattgatgaacatgtgtggtgcagcagccagggttgggtacgagatggcgagagacaatgccgtaaccatggagacaccagtagcgaatttctcaatcaggtcatcctcagtaaggtcaagcacctcagggctaaagactgacccattgtcataaacagac

SEQ ID NO: 17517 - DNA, 594 bp, Gossypium hirsutum
  Clone ID: LIB3830-002-Q1-N6-H2
caccaatccaccatctcagacataatcaatgtagaataggtatagaatacaacattatattctgctaatacagcttttacatacatattactggacaaaacctcgaatttaaacacgaagaaaccattaacagattggaactacaaaccttcaatttttctttttatgcccccactagctacttgtaatagtatattataaagccagtggatttggatctttacaatgtttatgtaacaatgtttgatagttgtagtttggcttgctttggagatatttcatggatatccgtaggcagtttcgaccatgggaacaattcagcattactcttcctcctatgcacaatggcagataagctcaacagcaaacaggcgagagcaatcaaaggaagcagaatcccaagagttcttcttggccaacacttcataatcaactccgcaggcaccttaccgtcaagactataaacggagttattcatcttcatgatctccactccgtttaaaatcgcatcaaccgtataccccatgctcttgctagaaggtccaacgcttacggtaatgaccccggaacgaccagcatcaaccacgaaatcag

SEQ ID NO: 17518 - DNA, 429 bp, Gossypium hirsutum
  unsure (1)..(429): unsure at all n locations; Clone ID: LIB3830-002-Q1-N6-H4
agatgaaatttgggaccctcaaacaagcttttattagactagaagttgaagctgaaattatgatgtacaaaggacgaaacaggaataaaagctagttttaacataaagctacctaaacagaatgtccctgccanttctcctaaccaaacagttctttttcttctttttttttttgtcctttcatcccccctctcttcaagtactgggactcagttattcacatggagactgatccatatgctatgcatttgcagctcctatattcccatggatccatagatttagaaggagaaagcaaaggactactctgtggcagcaacaactgttggcccttccaccttgaatttagcaccccatatctcctcttcttcagcaggcactgcagtgatcttgttcttaggattctcatagcttcttaatcctcctact

SEQ ID NO: 17519 - DNA, 568 bp, Gossypium hirsutum
  Clone ID: LIB3830-002-Q1-N6-H5
attgtgaaataaactaagcaaaacaacactaccaaccaccatcctcgttgaaagcctactccaaccatgcatgcacaaattcagtgttaaaagatttacagtttcaacacttccaaatgcaaaaagcaatcacctcccctcaatttcaactgcccaactagtcctcccaacaaaacagacttcactcacgtccccccccctcaatcaaaaggagaagaaaaagaaaaaagagggtacaaaacaacatatctagagtggcttatatgtggtttacacaactggaatcggatcggtcaatgactcggaagtgccactgctgccattgagaaccgtgacatttccatcagagtcaacatctactattactgaatcaccttccttgatttcccttgcaagcatcttctcagccatgctgtcctccagaagtctcattatggctcttcttaaaggccttgctccataacttgggttgtacccttcttccaccaccctttctctaaacctttcggtcacttggagctcgatttctttgcttttaagcctgtcaaacacttctttgagcattata

SEQ ID NO: 17520 - DNA, 508 bp, Gossypium hirsutum
  Clone ID: LIB3830-002-Q1-N6-H6
cggaaaataaaaaaataattttatattccatgtttgggcaatagacatatacaccactcaatcacatactattagctacaatttgatagtaaaaacaagaaaaagaaaatctcaaattttatacaacctttttttactgctgtaaaactccacaattgttaagagcaatccattgggggatcccccccaattgtattaaatccgaatatactaaagtttgtttccttttttcatgatgatgttgcaaatgagggagaaacagtgaagggttcttgttcttcacaggtgagcatatcatgaggaccagctttttctcggccaactcccaaaaggtcaaggtaataaaggtaatgagagatcatattgttcatggaatcactatcaccttgaccacaaacttggtcaccataaagaacattcatggtggttccaaaacctggaaccctcttggccaaggtgtcgttcttggttggtttccagttgccaacgaaaactcatgggctgaggg

SEQ ID NO: 17521 - DNA, 541 bp, Gossypium hirsutum
  unsure (1)..(541): unsure at all n locations; Clone ID: LIB3830-002-Q1-N6-H7
gcgagaatcaaatagcagaatttaaaacattcatatgtttttcagtattcaaacataaacaaattcagacacaatcacttttacagtcactcaaatttaaaatttagtccaaagtccacaaaaaaaacacataaaaaattggctcactttaagaacctctgaaagcagtgcaggcaaggcttatgcatgcatatacccccgtttttactttaacttnacaacagattttgaccaaattcatgttgctttatttacaaacactagttattatggaaagttcgttcagaaaacaccctccgccatggcagggaaatcatcaaagttccaaagatccatcgggtttccaccatcctgtgttgcatctccattgaggaaggcatcaatagtggcgtcccagtttccttcaataaatggtggcatttggaagtatttcatctggttgtccaaagccaacagctcgtccgacaaggtctttgcggagttctcttcagcatgcataagattgtcagaacttggtttcagcttcttgctagggttagca

SEQ ID NO: 17522 - DNA, 112 bp, Gossypium hirsutum
  Clone ID: LIB3830-002-Q1-N6-H8
tcgcgcacctcggggcagtctttgcttaaagaccatggccttcttcaagacattataccttctcatatgctgaaagaagagtagattattggaacactcagtgaactaatca

SEQ ID NO: 17523 - DNA, 685 bp, Gossypium hirsutum
  unsure (1)..(685): unsure at all n locations; Clone ID: LIB3831-001-Q1-K6-A1
gaaaaccaacgcttgaaaaanctatgatctccttaagaccagtacgaagcaatcaaagcagataatgatgcactccaaactcagaaccaaaagctgcatgctgagataatggcactgaagagcagagaaccaactgagtctatcaacctcaataaagaaactgaaggctcttgcagtaacagaagtgagaacagctcagatgtaaagttggatatctcaagaacaccagcaattgacagccccttatctactcatccaacaagcagaaccttcttcccaacatccattaggccaacaggtggtgctgcacaactattccaaacctcatcgtcaaggcctgatcaccatcatccatgtcaaaagatggatcaaatggttaaagaagaaagcctcagcaacatgttctgcaccattgaagatcaaactgggttttggccatggcttgagcaaccacatttcaattgattcatagtgtgaactcattgaccatgctgtcaaacttggaacgttcttgatctaaagagggaaactgctggttatatataatcataatattgaatgttttggtaccttcagagtggtgtataaaagttgaattatattcaggtttaagactcttcatcaagaagggctgaaaagataatattggagataaaaggtgtggtttgggttatatatattatat

SEQ ID NO: 17524 - DNA, 639 bp, Gossypium hirsutum
  Clone ID: LIB3831-001-Q1-K6-A10
ctcatactgtcattctcctcatggctaaccttgcgtctaagcttcagccatggtggctgttgcttgtaattcccttcttgtttgtctccaacacttatcattgtgtcaatgcagaaccacaagtgccttgctacttcatcttcggggactcattgtcggataatggaaacaataacaaccttgcgacggaggccaaagtaaattattggccttacggtatcgatttccctaaaggacccactggaaggtttactaatggtcgaaccatgcaggatatcattgttcaactactgggtttccaagaatttattcctccttttgccacttcaagaggccaagagattctcaaaggtgttaattatgcatctggttcggctggaattctcaatgaaagtggccaacatctgggtgttcgaataagcatggacatgcagttaagcaaccaccaaagtgttatctcaacaatagttgagatgttgggaaaatgtgcagcatcaaagcttttaggcaaatgcatgtatgcggttcaaataggcagcaatgactacattaacaactatttcaagccagagatgtacaacagcagccacctattcactccagagcaatatgctacttatctcatcgaacaatattcac

SEQ ID NO: 17525 - DNA, 646 bp, Gossypium hirsutum
  Clone ID: LIB3831-001-Q1-K6-A11
tggcaatacagcaatatgaacagcagcaacaacaacaagagaatcacccttccttcttgctagatgctctctactgtgaggaagaagcggatgcaggggaagttttagaggaagagagttcttgtgtgggctgtaacaatggcggaaacccttcatttttcccactgttgttgttagagcaggatttgttttgggaagacggggagcttctttcactttttgctaaagaaacagagcagcagccgtcttgtttcaatgtgggaaccgatgagtccctagcaatggctcgccgagaggctgtcgagtggatgcttaaagtcaatgctcgatttggattcaccactctcacggctgtactttccattaactatttggacaggttcttaagtacctttcagtttcaaagagataatccttggatgatccaactcctggctgtcacttgtctctctttggctgcaaaagttgaagagacacaagtgcctctgctcctagacctacaagtggaggagacgaagtatgttttcgaggccaaaactatacaaagaatggagcttttggtgctctccacactgaaatggaagatgcatccaattacacccctttcatttctagatcacatcataagaagactttggttgaaaac

SEQ ID NO: 17526 - DNA, 642 bp, Gossypium hirsutum
  unsure (1)..(642): unsure at all n locations; Clone ID: LIB3831-001-Q1-K6-A12
cttctctctctttcctcttcattccctgtcactcgactcaatgggntgaaaaatcaaagaccacccttctcttttcttccttcgttattctcctcttcttttctctttctgctgctgtttcctcccctttccagctccattccctacttctccgccctctcccgtcggcgccagttctatcatggcaagattccggccttcctttcaactctctcgttgaaacttccgatttggacacagttaattccaacacttcgctggggttgcagttggagttgcaccatttagacgctttgtcatcggaagaaacaccggagagactcttcgacctccgcctccaacgcgacgcgctccgtgcagaaacaatcaactccctcgtttcaaaagccgttgctcgtaagcatccacgcgcccccggaaggcgtcctgggtttagtagctctgttatttcaggactcgctcaaggtagtggagagtattttacgcgcctcggcgtcggtactccgccgaggtatctttacatggtgcttgacaccggtagtgacgtcatttgggtccaatgttcgccttgtaagaaatgttactctcaatccgacccgatatttgacccgactaaatcacggtcattttccggtattccct

SEQ ID NO: 17527 - DNA, 641 bp, Gossypium hirsutum
  unsure (1)..(641): unsure at all n locations; Clone ID: LIB3831-001-Q1-K6-A2
ngaagcatttaacctcaacactccggctaatagcccttcagatttttctcgaaggcattcaactgacagagaaagtgtagcttctttgcgtgatcccaacaaggagaattatatagaccaaaatccaaaaccaacaagactcagatcaccagctgtttcaaagggtaaaaagaatttcatggcaccgacaatctcggctgcttcgaagatcaatgcgtcacctagaaagaaaatcttggtagagagaaacgagctggctcgatcttctgtttcattctctgatgtcaaaagtctaatcatgcaacataatgaatcaacatcggagattgctttgaagccgaagaaggtttcattttctgatgttaaaagcatgatcatggaagataatgaatgtaaggagcctttggaaggcaatgccaattcggttcaagtgattcccagctttgagattagtcctaaagtttcaattttagcaccacttgatgcagatccattgatgcttcctcatgacccccaaaccaattacctttctccaaggcctcagtttcttcattacaggccaaatcctcgaatcgagctttatcaggaacaagatggcaagcaactcaaggagtgcttagcaacggaaagctattacgaca

SEQ ID NO: 17528 - DNA, 632 bp, Gossypium hirsutum
  Clone ID: LIB3831-001-Q1-K6-A3
gtttctatagggttttaattcgttcttatcattacctctcttttaacctttctcttttttgcttgctctctttgtttttcgagatctgtgcgttttcttcttttcaattagcttcttgaaagctttattttcttaagaacaggaaaccgctgaagagatggcaccaccaattgagactccaaccaagtcctctggctctcaccacgcatcacatcctcctttgaatgaaaggattctttcatcgatgagcagaaggtctgttgctgctcacccatggcatgatcttgagattggacctggagctccaatggttttcaactgtgtgattgaaatcccaaaaggtagcaaggtgaaatatgaacttgacaagaaaactggtctgatcatggttgatcgagtgctttactcatcagttgtgtatcctcacaactacggattcatccctcgtactctttgtgaagacaatgatcccatggatgtcttgatcattatgcaggaaccagttattccaggatgctttcttcgcgctaaagctataggtctgatgcctatgattgatcagggtgagaaagatgacaagattattgctgtctgtgctgatgatcctgagtatcgtcactaccatgatatca

SEQ ID NO: 17529 - DNA, 688 bp, Gossypium hirsutum
  unsure (1)..(688): unsure at all n locations; Clone ID: LIB3831-001-Q1-K6-A4
gnggnaaatccccttttttgtgcagtggaagtaaaaatacctaccattagaaaaggagaaggattggtgaagtattgcagcgctccgtaaaggcattttggtatagcaagtagcagcagttcatcaaaaggcagcatttctttttgtaccaggggccctttaacaagctcaactctcgcgcttctttgcgtttcaaatctctctgcaagtcgcaggacatctgaagcagaaagcccagattcctctctaatcttagattccagatttgcataggttattgcgtatcctgagcctcaagttgcagatagggagatggttaaggtcaatcctaccccaagaaaaccccgggttttactcgctgccagtggaagtgtagctgccataaagtttgggaatctctgccattgtttctctgaatgggcagaagtaaaagcagttgccacgaaagcttctttgcatttcattgacagagcatcacttcctaaggatctaaagctttacactgatgaggaggaatggtctagttgggggaaaataggtgacagtgtgcttcacattgagcttcgtcgatgggctgatattatggtcattgccccattgtcagcaaacacacttggcaagattgctggnagattatgtgacaatttgttaacttgtgtcgtacgagcatgggactacagcaagccaa

SEQ ID NO: 17530 - DNA, 681 bp, Gossypium hirsutum
  Clone ID: LIB3831-001-Q1-K6-A6
gggaaagggtaggctttgttactcttcttctgcatgtttgtttctccagagctgataaaatagtagctttgcctggccaacccaaagtcagtttccaacacttctctggctatgttaccgtccatgatgagaagccgcacaggcagagagctctgttttactactttgttgaagcagaaaccatccctgcttctaaaccacttgtcctttggctaaacggaggccctggttgttcatctgttggagcaggagcttttattgaacatggaccctttaagccaaatggaaagactttaaccaaaaacgtccacagttggaataaagaagctaatatgctgtacctcgagtcaccggcaggagttggcttctcttattcggctaataactcattttacaccgatttaaacgatgaagtagtagcaagagacaattttgttttcctggagaggtggttactgatgttccctcaatacaagaatagagatttctacatcacaggagaaagttatgcagggcactatgttccacaacttacactgcacatcattcactccaatctgaagctgaatctgaaagggatagctatagggaatccgcttctagaattcgttacagatatgaactctgcagatcaatattattggtctcatggcctaatatcagattcagcttatgagctac

SEQ ID NO: 17531 - DNA, 633 bp, Gossypium hirsutum
  Clone ID: LIB3831-001-Q1-K6-A7
cgccccagaaatatagtaaagcagagacaatgagaggaacattggtgttgacttggattctgatcatctgcctctcccaagtagccgtgcagagccaatactactcgaagacccgacactatgatcgcaagccagctaaggaaaccaatcttcatttctttatgcatgaacatacgggtgttacagcagtcgtggtagcccaagctaacatcacaagcaatagttcatcagtgccatttgcctccctggttgccgttaatgatcccctcaggactggtcctgagcctgactcgaaggtgattggaaatgttcagggtattgcgctcctggctggaatgaatgcatcgagcacacaatacatagattttggattcaataccggtaagtttaacggcagctctctaagcgtattttcaagaggagaacctgggctagcggtggtcggaggaagaggacgattcatgatggcaagaggggttgcactatttaaccctatccttataaatgccaccaatgtcattattgaatttaacgttactgtagttcattactaaggtgctatttacaaactcaattctgatcgattgtgaaaatgtcttggttctgctccacttgattagaataaatgtacga

SEQ ID NO: 17532 - DNA, 646 bp, Gossypium hirsutum
  Clone ID: LIB3831-001-Q1-K6-A8
gggatttagtcctgaattagctcttgttacgattggaggaggcaaggaactcgaagagaaacttgtggttcgacctaccagtgaaactatagtaaatcatatgtttacacagtggattcacagttatcgtgatctccctctaatgatcaatcagtgggcaaatgtcacaagatgggagatgcggacgaaaccatttgtaaggacccttgaatttctttggcaggaaggtcacacagctcatgccacactggaagaggcagaaaaagaggcactgcaaatgattgatgtctatacaaagtttgcttatgagcaagctgcaatacctgtaattgcaggtagaaaatctaaagtggaaacatttgctggtgctgacaaaacctatacaatagaggctatgatgggtgatcgcaaggccttgcaagctggaaccagccacaatcttgggcaaaacttctcccgtgcttttgggacacagttcactgatgaaaatggactaaggcaacatgtgtggcaaacatcttgggcaatcagcacaaggtttgttggtggtattataatgacccatggagatgatgccggcctgatgcttcctccgagaattgcaccaatacaggtggtaattgtacctatttggaagaagttgatg

SEQ ID NO: 17533 - DNA, 617 bp, Gossypium hirsutum
  Clone ID: LIB3831-001-Q1-K6-A9
gccgccgcttgaggtgcaagggtttgtggggcttctcggatcatcgctgttgatgtgaaccccagaagatttgaagaagctaagaggtttgggattacagaatttgtgaatccaaaagactacgataagccagttcaagaggtgattgtggagaccggcggaggagtggatcgcagtgtggagtgtacagggagcgtccaagccatgatttccgcttttgaatgcgtccatgatggttggggtgtttgtgtgctggtgggtgtgccaaagaaagacgatgcattcaaaactcatccaatgaatctactaagtgagaggacccttaagggtgctttttatggcaactataaaccacgcactgatattcccatggttgtcgacaaatatttgaacaaggagctggggctggatatggacaagttcatcacacactctgtgccttttgccgatattaacaaggcattcgactacatgctccagggtataggtctgagatgcatgattcatttggatgcttaaggaaatgttgctgctgtatatttgcccatccaaggatcaaaactctaatgttttgtcctactatgtgttatattatgtgcctacttaagctacctttc

SEQ ID NO: 17534 - DNA, 580 bp, Gossypium hirsutum
  Clone ID: LIB3831-001-Q1-K6-B1
gtgataaggggcttaaagtttatgatccgggttacttgaattcagctccggttcggtcgtcgatttcttatatagacggtgatgaagggatgcttagatacagggggtatccaattgaagaactggctgagagttccactttcttggaagtggcctacctcttaatgtatgggaatttgccttctgaaagtcagttagcagactgggaatttgctgttagccagcattcatctgtgccgtaagggattctggacattatacaatcaatgcctcatgatgctcatccaatgggtgtacttgacagcgcaatgagtgctctttctgtttttcaccctgatgccaatgctgctcttagaggccaagaaatttataagtcgaaacaagtgagagacaagcaaatagctcgcattattggaaaggcaccaaccattgctgctgcaccttatttgaggatggcaagaaggcctgcagttcttccttccagcaccctttcttatgctgagaactgtctctatatgctagattcaatgggcaacctgtcttataagcccaacactcgaggaactctccgtgaaacgac

SEQ ID NO: 17535 - DNA, 643 bp, Gossypium hirsutum
  unsure (1)..(643): unsure at all n locations; Clone ID: LIB3831-001-Q1-K6-B10
gncgaccccccanaaactgtttagatttcagtatgttatcagaggcaaatgagaatgagatccctcaagttaccattcaccccgatgaccctgttgctttgcccttctcttcgggaacaacagggttacccaaaggagtcgttttaacgcacaaaagcttgattacaagcgtcgctcagcaagtagatggagagaacccaaatctttatttgacacatgacgatgttgtcttgtgtgttttgcctttattccacatttactcactcaacagcgtgctcttgtgttccttgagggctggagctgcggttctgttaatgcagaagtttgagatagggacgttattggagctgatacagaggcataaagtttcggtggctgcggtggtgccgccgttggtggtgttgttggctaagaatcctgtggtcgcccagtttgatttaagctcaatcagggtggtgctttcaggggccgccccgctcggaaaagagctcgaagacgctctcaggggaagggttcctcaagccgttttgggtcagggatatggaatgacagaggcaggaccagttctatcaatgtgcctgggttttgcgaagcagccctttcctacaaagtcaggttcatgtgggacagtggttaggaatgc

SEQ ID NO: 17536 - DNA, 665 bp, Gossypium hirsutum
  unsure (1)..(665): unsure at all n locations; Clone ID: LIB3831-001-Q1-K6-B11
gtagataccttgntggaatgggaccttctgngaatgattctagtgcacaaaatgactggaaaggggcatggtggcacagtagcttcacagttcattcaggttttgtggaggatgacagccctttttccacgggaggtcagaagggaacgtattatttcgaattttctaggcctttaagaaccatggatcgtcttcaacaggatgttcagttcacaataggtggatcaagcaagatgtcggttgcactctggtatccggttgacgggaatccatggagtggatctggacactatactattaactgcgattgggtgtcgtttgatattgcttcaggtggttctaagctaaccaagtctgcgaaatcaagcagctcctgggatgctgcatctgccttttctcttttattctcagtagcagctctttgtgtggctatatttgtggcgtatcaggtttcaagaccaaagaatatcccattcacaccaatggaaaatctttagactacggatgttaaagtctgccattgtacaattaatcgagttcgagtttaagcttgagcttctcatacatgttagagattgtactattattgcttgtgtttgtactgccttagcttgagtttgtactttgaatgaattccttcccacttaattactattcttttaatt

SEQ ID NO: 17537 - DNA, 568 bp, Gossypium hirsutum
  unsure (1)..(568): unsure at all n locations; Clone ID: LIB3831-001-Q1-K6-B12
cngaatgccacatccaattttagccgtagagtggatgggtacgaactgttggatcaaagcggncgaaacaaggggaagaaaatccctctcaatataggacgtcttccaagaggagacctcacagcgtggtggcttccctgagttacaggcgagatcgagctaagaaaaggcagattttcttgaggtcatacaagttatcagccatggacaacaactggggacaacccaagccaaagtcgcggaaactgaagaagatggtgcttaaggttaagaccgtggtggtatcactggtgtcgtttatgcgaattggttccttcaaatcttgtaactgtggatcagcaatttgtgcagctgctcctatcgccattaagaagtgttgttgaatgattaaggagtaaagtttgtgctgtaagctttactttctctctagttaatattctctcaactttttaactttttgactattatgtttaggtgaataacagcagctaaaattaacttagaatttgtatttatgatccaacgattgctttccagttatttgattgcagttaactccttgattcct

SEQ ID NO: 17538 - DNA, 692 bp, Gossypium hirsutum
  Clone ID: LIB3831-001-Q1-K6-B2
ctgtttttaccggtccaaatccccggtcgcccagcgtccgacatacacttatccactcccacccccaccattggctgtttgtaatcatccgaaaaagatggtgaccgtggaagaagttcgtaaggctcaacgtgcccaaggccctgccaccgtgttggccatcggcacatcaaccccgcctaattgtgttgatcagagcacataccctgactactatttccgtatcacaaatagtgagcacaaaaccgagttgaaagagaagttcaagcgcatgtgtgaaaaatcgatgatcaagaagcgatacatgtaccttacagaagagattttgaaagagaatcccaatgtatgtgaatacatggctccttcactggacgctaggcaagatatggtggtagttgaggtgccaaagctaggcaaagaagcagccaccaaggccattaaggagtggggccagcccaagtccaagatcacccaccttgtcttttgcaccactagcggtgtggacatgcctggggctgactaccagctcaccaagcttttaggcctccgcccctccgttaagcgcctcatgatgtaccaacaaggttgcttcgcaggggggacggtgctccgagtggctaaggacttagctgagaacaacaaaggtgctcgtgtacttgttgtgtgctcggagatactgctgttacctttcg

SEQ ID NO: 17539 - DNA, 671 bp, Gossypium hirsutum
  unsure (1)..(671): unsure at all n locations; Clone ID: LIB3831-001-Q1-K6-B3
gccgagtccatatgcgatgaggccaagnattgcccttaacctcaaatccctcacttacgaatacattgaagagaagttatgggaaggcaaaagcgagcttcttctccaatcaaaccctgtttacaagaaaatcccagtcctcattcacggcgataacaagccaatctgcgaatctctcatcatcgtacaatacatcgacgaggcttggtcttccggtccttctattcttccttctgatccctgtgaacgtgctgtcgctcggttttgggctgcatatcttgacgacaagtggttcccagcggtgaaaagtataggagtcgctaaaggagaggaagcaaagaaagcagcaatagcgcaagtggaagcagggttggctttgatggaagaagcatacgacaagtgcagcaaagggaagggttactttggtggggatgaagttgggtaccttgatatagcttttgggagcttcttgggatggcttagagtgacggagaagttcaatgcgatgaagctgctggacgaggggaagacgcctggtctggtaaaatgggcggacaggttctgttcccatgccgctgtgaaggatgttatgcctgatactgacaagcttgcggagtttggtaagtttgttattgccaaaatagggccgctggcgctgctgctgaaatgca

SEQ ID NO: 17540 - DNA, 639 bp, Gossypium hirsutum
  Clone ID: LIB3831-001-Q1-K6-B4
aaaaatacctcccaaaatcttcaacccagtatctgtctctttaattggtacaaatatccctgcgccgcccttcaattttttcttcgtcatttgcttaaatttcttggcaaccaaacagaaccgagaaaatcgaaattttatattttttatattttttggggatttttttgaatatcttttccgatcatgatgcaaagtctgaaatactggttagcagagcatccatcaatcgtgaatttccggtggagtcacacccaatcatttggttcaacgtggtcattccttttcgccgccatcgccgtttacatcgtcgccgttataaccctccacagtttcctttcccttatcctctccaaaagccgacgtatccctctcggaccaatcccagccatccacagcctctgtgtttcattaatctccgccgtcattttcgtcggaatcctttactccgccgccgctgagatccgcgacacacgctggttctggcgccgtacaaaaacaatctccacaccatttcaatggttcctttgtttcccactcggtactcgtcccttccgccgtgtattcttctggtcatacgtcttttatctctcccgcttcctccacctcttccgtacattcttcaccattctccgtcac

SEQ ID NO: 17541 - DNA, 670 bp, Gossypium hirsutum
  unsure (1)..(670): unsure at all n locations; Clone ID: LIB3831-001-Q1-K6-B5
cttgaatcctactgaactaaaanaacctaggtgcaaggcctgccaaaatactccacatattcgtgacacaaggcacttatttcttgagcttcctttgctaaaggataaattagttgagtacatcaacaaaatgtcagttgatggttcttggagccaaaatgctattaatacaacacaagcttggctcacagaaggacttaaagcacggtgtattaccagagacttgaagtggggggttcctgttccacacgagaattttaaggacaaggttttctatgtctggtttgatgcacctattggatatgtctcaattactaaatgctacacatttgattgggaaaaatggtggaaaaatcctgaaaatgtggagctgtttcagttcatgggaaaagacaacataccatttcatactgtgatgtttccatcaactcttcttgggaccagtgaaaactggacattgatgaaaagcatcagtgttacagagtatttaaattacgaagctgggaagttctccaagagtaaaggcataggagtttttggcaatgatgtaaaggatacaaaaatacctgtagaagtatggagatattacttgttaaccaatagacctgaggtttctgacaccttgtttacatgggacgacttgcaagcaaaactgaataaacgagtgctt

SEQ ID NO: 17542 - DNA, 607 bp, Gossypium hirsutum
  Clone ID: LIB3831-001-Q1-K6-B6
cagaaggaccttagtttcctcacaagtctaccaggagcagccgaaaagctgaaaatcctgagtgcagatcttagtgaccctaacagtttcgatgcagccattgaaggaagcaaggcagtgctccatgttgccactcctgtcgatttccaaaacaaagaatctgaagaagcaataactgagaggtcaataaatggagcagtaggcatcttgaaggcatgcttaagatcaaaaacagtgaagagagttgtatatacttcaagtgcatccactgttgttttcaatggccaagaaatggacatgatggatgagagtttctggactgatgtggatttcgttagacaaaaattaagcccaaacgcacattcttacattatttctaagacatggacagaaagggcggctcttgaatttggtgcacaacatggattggatgtggtgacagtgattcctagttttgttgtaggccctttcatatgccccaagttccctggttcagtgcgcacatcattggctctggtcttagggaaccaatctgaatatagtttccttctgaatttttcaatggtgcatgttgatgacgtggcaagggcacatatattcctgcttg

SEQ ID NO: 17543 - DNA, 656 bp, Gossypium hirsutum
  Clone ID: LIB3831-001-Q1-K6-B7
cttgggttgagtgtagagatgagaaaatatgggtgccaaagttcttttcttctttgctttgctttccttttcagctgtctcggcatttgcacaggatgaggaagaccaaggtcttgttatgaacttctacaaggattcttgtcctcaggctgaagacattatcaaggagcaagttaagctactgtacaagcgacacaaaaacactgctttttcttggctgagaaacattttccatgactgtgctgtccagtcatgtgatgcttcactgctgctggactccacaagaaggagcttgtctgagaaggagacagacaggagctttggcctaaggaatttcaggtacattgagaccatcaaagaagctgtagaaagggaatgtcctggagttgtttcttgtgctgatatccttgttctgtctgctagggaaggcatcgtttcgttgggaggcccttatattcctctcaaaactggaagaagagacggtagaaggagcagagcagatgttgtggaggagtatcttccggaccacaatgagaccatctctggcgttcttgacaggtttgccgccatgggtattgacacccctggagtcgttgcccttctaggagctcacagtgtcggcagaactcactgtgtgaagctggtgcatcgtttgt

SEQ ID NO: 17544 - DNA, 666 bp, Gossypium hirsutum
  Clone ID: LIB3831-001-Q1-K6-B8
gcttataactgtaagagctctcttcagtcctcctccatcagtgatctcaatctccatcctatatatctcaccaagtaacacacactctcatggctcctgaactggttcaagcaggtgttaaaccaactgtgttggctaaaccagtcaccttgcccaagcgagcttacgttaccttcttggctggcgatggagattacgtgaaaggcgttgtagggttagccaaagggttaaggcaggtgaaatccgcataccctttagtggttgccgttttgcccgacgttcccgaggagcacaggcggatcctggagaaccaggggtgtatcgtccgagagatcgaacccgtttacccgcccgagaatcagacccagttcgccatggcttactacgtcatcaactattccaagctccgtatttggaagttcgtggagtacagtaagatgatatacctggacggggatattcaggtgtacgagaatattgatcacctattcgacttgcctgacgggcaattctatgcagtaatggactgtttctgtgagaaaacgtggagtcataccccacaattcaagatcggttactgccaacagtgccctgacagggtcaagtggcccgccgagatgggtcagccacctgcactttacttcaatgctggcatgtttgtgtttg

SEQ ID NO: 17545 - DNA, 688 bp, Gossypium hirsutum
  unsure (1)..(688): unsure at all n locations; Clone ID: LIB3831-001-Q1-K6-B9
ccttctcttgcctttccaggttccaaactctcgttcttcctccagctcctatcctttaacaggaaatggcggttacattcaacgacttgggttctgctgccggcttgaagaagctcgatgagtatctcctcactcgcagttacatctctggataccaagcttcaaaggatgatatcaccgtctacacagctctatctggggccccatcgtctagctatctgaatgtttctcgatggtacaaacacatcgatgcccttttgaggatctcaggtgtttctgaagaaggctgtggtgtgactgttgagggatttgctcccgctgaggctgtggccactcctccaactgcagattcaaaggctgcagctgctgaagatgacgacgatgatgatgtagacttgtttggtgaagagactgaggaggaaaagaaggcagctgaagaacgtgcagctgcagttaaggcctcttccaagaagaaagaatccggaaagtcctcggtattattggatattaagccatgggacgatgagacagacatgaaaaagcttgaagaagcagtaagaagtgttcaaatggaaggactactttggggagcttctaagcttgtgcctgttggttacggaatcaagaaattgcaaattatgatgacaattgtggatgatntagtgtcggttgatactctnngatgaga

SEQ ID NO: 17546 - DNA, 586 bp, Gossypium hirsutum
  unsure (1)..(586): unsure at all n locations; Clone ID: LIB3831-001-Q1-K6-C1
ngaaaatctctggacggctctcatttccaaacttgaatatcctcatgaccagtctctacaagagggatctgtataattttttgcccagttttcgcttgaaagattgaaatattatcccctctgcccactctccagcactacccttttttgagaagtccctttgctgcccaaatactcttccattttttagttcctgttttctcaaccgtacactgagggaaagcattgagtcaagaacaagagagaaacgatgggcgaggagcagcaaaatcagagcgatgtgattcctagagtgaaactgggaactcaagggcttgaggtttccaagttagggtttggatgtatgaggcttacaggaatatacaatgatcctgtccctgaagatgttgacatctccatcatcaagcaagcaatcgacataggaatcactttctttgatacatcagatatctatggacccaaaagaaatgaattattggttggaaaggcattgaagcaattaccacgagagaatgtacaattagccacagaatttgatattgtcaagtcggatcctgcgactgggattgcaataaatggtacctct

SEQ ID NO: 17547 - DNA, 661 bp, Gossypium hirsutum
  unsure (1)..(661): unsure at all n locations; Clone ID: LIB3831-001-Q1-K6-C10
atttcgtctttttgtgaacaatctttcttcttcttttgttttttcaccctaaaagaaaaatgaagccttttgttcaatgcaagctcgcttcgattctttaatggcgaattttctcttcattgggtcactgcttaatggcctttttttcttctctaaatctgttgtataggcattaatcagagtctggttttatctctgaagaacatatggatttcgagaaaaagaagggatggaaactggtggtgccacgtattttgaaaaagaaatcagcatctcgttgttttttccaaaaggtgaaaccaactaattttgacccgggctgtgcaccagtgtatctcaacgtctatgacttaacccctatgaatggctacttttattgggcaggcctcggtatatttcattccggtgtggaagttcacggtgtggagtacgcatttggagctcatgactacccaacaagtggtgttttcgaggtcgaaccacgacagtgcccgggtttccagttccgaaaatcgatattcattgggacaacatcgttggatcctatcaaagtacgggaattcatggagcgtaattcgacaagtatcatgnagatcatatcacttgatcatcaagaactgcaaccatttctgtaaggatatttgtcacaggttgacaggga

SEQ ID NO: 17548 - DNA, 693 bp, Gossypium hirsutum
  unsure (1)..(693): unsure at all n locations; Clone ID: LIB3831-001-Q1-K6-C11
ggggttctaaagcagctgaattcgtggcaggcaatttagataaggtcgcaatggcggaggtatncgaaaagatgtggagatgcaattgaagaagccattaaagaggcatacttaaccacggacatggattttctcaaggaagatgtgggtggtggtacctgttgtgttactgcaatgattcacgaaggtgatcttgttgtatcaaatgccggtgattgccgtgctgttttgagccgaaacggtgtcgcagaggccttgacttctgatcaccaggtttcgaggcaagatgagagagctagaattgaagctttgggtggttatgttgatttttgccatggtgtttggagaattcaaggttcccttgctgtttctagagcaatcggaaataaacatcttaaacaatgggtaattgcagaaccggagacaaaatcgttaaagattcggccggagtgtgagtttttgatcctggcctcagatggtctttggaacaaggttactaatcaagaggctgtcgatttagttcggcctttctgcgtagatattgataagcctgagccgttttctgcttgcaaaaaacttgctgagctatcgtcatggagaggctcatttgatgacatcagtgtgatgataattcaactagaacgctgttgagcttgaagatcgcttcggccaccnagacttgcaaaaattgct

SEQ ID NO: 17549 - DNA, 646 bp, Gossypium hirsutum
  Clone ID: LIB3831-001-Q1-K6-C12
tggagacaagccaatgatcgtcgtcacatataaaggagaagagaagcaattcgctgctgaagaaatatcctctatggtcctcatgaagatgaaagagatcgccgaggcatatctcgggtccaccatcaaaaacgccgtcgtcactgtaccagcttacttcaatgattcccagcgtcaagccacgaaagacgctggtgttattgctggcctcaatgtcatgcgtataatcaacgagccaactgctgctgccattgcctacggacttgacaaaaaggcaggaagttctggagaaaagaatgttcttatttttgaccttggaggtgggactttcgatgtctcattgttgacaattgaagaaggaatcttcgaagtgaaagctactgctggagatacccatttgggaggtgaagattttgataatagaatggtgaatcattttgtgcaggagtttaagaggaagaacaaaaaggatattagcgggaacccaagagctttgagaaggctgagaacagcttgtgaaagagctaagaggacgttatcttcaactgcccagactacaattgagattgattctctgtacgaggggattgatttctacacgacaattactcgagctcgatttgaggagttgaatatggatctgttt

SEQ ID NO: 17550 - DNA, 666 bp, Gossypium hirsutum
  unsure (1)..(666): unsure at all n locations; Clone ID: LIB3831-001-Q1-K6-C3
aaaattaagaaaaaaatcatacgcaatgagcactgctggtcaggttattcgttgcaaagctgcggtggcatgggaggcggggaagccactatcgatagaagaagtggaagtggcaccaccccaaaagctgaagtccgtattaagattctcttcactgctttatgtcacactgatgtatactactgggagtgtaagggttacactcctctgtttcctcgtatacttggtcatgaagcctcaggtatcgtggagagtgtgggtgagggtgtgaatgatttgaaacctggagatcatgtgctccctatcttcaccggagaatgcaaagaatgtcgccactgtctgtcagaagaaagcaataacatgtgcgaactgcttaggatcaactgcgaccgaggtgttatgcttgctgatgggaaaaccagattttccatcaacggcaagcctatctaccactttgttggaacctcgacctttagccaatatactgtcgtccatgttggccaggttgccaagatcagtccaaccgcccctcttgataaagtctgtcccattagctgtgggatatgtacaggttttggggccactgtgaatgttgctaaacccaaaagggtcaaactgttgcagtttttggactgagtgccgttggtcttgccgncgctgaagtgc

SEQ ID NO: 17551 - DNA, 599 bp, Gossypium hirsutum
  Clone ID: LIB3831-001-Q1-K6-C4
atttcagtctcagtaaagctttttttgcaccagccaaatgggttcagttatatactctttctcggagtgagggcttttgttccaagtggtttactgcttcagccttcagcttcaggttatggcatcaggaagctctccggaagatactaccagggtcaactcatgcagatgacaatgatggccacacccaatatcaacaaggagctgcagtacttgaacaaggaagacagactgttgcgttggcttttagttaagcatcgtgactcgaaatatgggctggaattccttaatgaagatgatggggaattggagcttagcaaactctctcgaggcaatatatatgaagaggacattgatgacgacgacgatgatgatgatgatgaatacgatgagaacccgggcaatggcggaaaactctgatcggtataagattttgataatccgaggatagagtagaacctgatagataattgaagtcgataactatgttctttgtctttgtagcatgcctttttaaagttttgaatgatccaacttatgttgtttgtaggtctttaagagactagaagaagtacagggaattgcgaccatatttcaat

SEQ ID NO: 17552 - DNA, 594 bp, Gossypium hirsutum
  Clone ID: LIB3831-001-Q1-K6-C5
caagggggggggggaatggtttatacaaaaaaaagatttaaaatctgtacttattcctaatttccttatcttttgatcccattaatgtatttttggcactagtcttagagaatgataaaaaaaaaaaaaaaaaaaaaaaaaaaaaaaaaaaaaaaaaaaaaaaaaaaaaaaaaaaaaaaaaaaaaaaaaaaaaaaaaaaaaaaaaaaaaaaaaaaaaaaaaaaaaaaaaaaaaaaggggggcccggtttaaaaaaaaaaaagtttaccccccgaaacattccaaggaaaaacttttttttttgggccccctaaaataaattccacgggccgctttttaaaaacgctgaaaagaaaaaaaccttgggttccccaaattaaatacctttaaaaaaaatccccttttcccaagtgggagaaaaacaaaaaagcccccaacgatccccctttcaaaaaatttgccaacccaaaaagaaaaatgaaacccccctttaagcggccattaaaccccgggggggggggggttaaccccaagggtaaccattacatttgcaaacgcctaagcgcccgctcttttggtttttttcctttctttt

SEQ ID NO: 17553 - DNA, 665 bp, Gossypium hirsutum
  unsure (1)..(665): unsure at all n locations; Clone ID: LIB3831-001-Q1-K6-C6
gtgatagtcttgcagttcaactagtagatgaaaacactgggaagatctcttcatcattattgctgtggtaagttcacggcagaaggaaacaagtagcacctctggaatgcgtgagagtgttgaaacaagttcgcttttacagcatagggcaaaggaagttgttccgaaacgcacaatacagatggaagaagccatacaaaaccgtgattttgcatcttttgcaaaattagcctgtgctgatagtaaccaattccatgcagtctgcttggatacgttgccacccatattctacatgaatgatacatctcacaggataatcagctatgttgagaagtgcaatcgttctgaaggaacccctcaggtggcatatacatttgacgctgggccgaatgcagttttaattgcacgagatagaaaggcagctgctcaattaattcagcggctgctattctacttccctccaaagtctgatactgatctggacagctaccttctcggtgataagacgatacttaaagatgctggactcgagggattgaaggatgtggaagctttgtccccacctcctgaaaatggttcagctcagaaatccctgnggatgtcagttacttcatctgtacaagacctgngaaaggccctattctgctttcaaatgacaaactggc

SEQ ID NO: 17554 - DNA, 644 bp, Gossypium hirsutum
  unsure (1)..(644): unsure at all n locations; Clone ID: LIB3831-001-Q1-K6-C7
ccggngtcgacccacgccgtccgaggtaaatccaggatttttcagcttccgtggctaaagggtcacgtaaacagggaggtctgaatttctgagaatttttagaaccgggtttctctccgtaaatcaatatgttgaagctttgcttaatggtttctcatggctaccctcgtggtctggggcctgttttacaccaagagccaggctttagcaggatggtcaaggagtttggttccgtcttcccaggtcagctagtgaaacaagacatggtacagattggctcctttgatctgaggtgcaaccaattccatttccaggagcagccaaagccagttactgcactatgtgagaccaaactgattatcgatgctgatccaacggtacaaaaccccgtggttatagataaaccagatgcttatctagacacagcacggtttagcttcaggatagctgaaaagtgcactagacatgaaaaaatcttgaagtttcttatgtctggatcgaatgaattagagaatggggaacttgatttgtctttgctatctgatttgatgggacttcagccactgatgtttggcgtgcatcaacagccttatgcgtcttctctaatgtatccaagtagcaaaatcgattaccaggtgcctctc

SEQ ID NO: 17555 - DNA, 489 bp, Gossypium hirsutum
  Clone ID: LIB3831-001-Q1-K6-C8
caatttgtagcttttgcggtggaggcaagaatagtaaagttttgatcagaggagcgattgcgtaagttaaattataggttcgtttgctattcagaaaatgatgaagctggtaaaggtatgtttccttttccaagaaggaatataaaaggtgaggtgttcgtggcttgactcaagtctatttatttctcctaatacaacccgacccaaaatgtgaatttcaaatccatttaaattcactcgtatctgcaaatagtaattttattttttttaaagttaaaaaacttttattttaaaaaaaaaaaaaaaaaaaaaaaaaaaaaaaaaaaaaaaaaaaaaaaaaaaaaaaaaaaaaaaaaaaaaaaaaaaaaaaaaaaaaaaaaaaaaaaaaaaaaaaaaaaaaaaaaaaaaaaggggggggcccttttaaaggacccaattttacttccccgggcttgcaaggtataagtttttttttagggcccccaaaat

SEQ ID NO: 17556 - DNA, 619 bp, Gossypium hirsutum
  unsure (1)..(619): unsure at all n locations; Clone ID: LIB3831-001-Q1-K6-C9
tngaacacaaatctcgctttcgngaaaagcctcaaatggcagaccaaccgcagatttatgaactcaacaatggaaccgtggttgttaagattaccaactatggctgcactatcacctcattgtctgttcctgacaaaaacggtaaattagccgatgtcgtcctgggattcgacactgtcgaaccgtacgtgaaaggtgcttcaccttattttggatgcattgtgggaagggttgcaaacaggataaaaaatggcaagtttactcttaatggaacggggtactctttgccaatcaacaagcctccaaacagtctccacggtggattcaagggttttgacaagagaatatgggaggtagcagaatataagaaaggcgacaaaccctccattacttttaaatatcgcagcagcgatggtgaggagggttacccgggtgatgtttctgtgactgcaacctacactctaacttcaagcatgacaatgaagcttgacatggaagcagtgcccgagaataaggccactccaattaacttggctcaacatacttactggaacttagcaggccacaactcagggaacatacttgaccatacaattcagatatgggcatcagaaatgac

SEQ ID NO: 17557 - DNA, 635 bp, Gossypium hirsutum
  Clone ID: LIB3831-001-Q1-K6-D1
gaagaggggaaaatcatagatcctctctgtcttggactgagagtagggctttagtctctcttttcacactcttcaacgcataaagagggcagcaaactttgcatctctgccccctctttttctctaatcagcaaaagttgaagaatcagtgaagctgttgaatatatatataatgatgggagaaagaatctcaccagggagttattttcaataccctccacctggtttcccttcactttctcctcatagaccttcatctattactacagatcgtgaaagaacttagctgaattattcacagagaaagagaagttgggacctttcacacaagttcttcctcaatgcaccgcgcttcttaatcaagagatcataagggtctcaagttttagtccaagtttattagatcatgagagatttgagcatgatagtcctattaggtcatttggtcatcatcccaatggaagacaaatggatttggaaggatggtccataatgcaaacagaggaaaatgggcatctgcaacgagttgctccggttcaagctgcatcaatgggttggcctggtttgccaggagctccaacaacaccgcttgtaaagaaagttgttagactcaatgtacctgtgggatcaatatc

SEQ ID NO: 17558 - DNA, 658 bp, Gossypium hirsutum
  Clone ID: LIB3831-001-Q1-K6-D10
gctcaatgcaagcagatgccaaaccccattgcggtggaagcgcgtgcacattcaacatgacctacggtggctcaaccatagccggtaacctttcacaggacaccacaaccttagccactgacccaatcccaaactacactttcggttgcctccaaaagacagcaggcagctcagtgccaccacagggcgtattgggcctgggccgaggcccattatccctcctttctcaatcccaaaatttgtaccagtcaacattttcatattgcttgcctagcattaggtcacctaacttttctgggtcattgagacttggaccaagtgggcaacctgtgaggatcaaatacaccccgttgctcaagaaccctaggagaccctcactttattacgtcaatttgattggaattagggttggaagaaggattgttgatatcccaccaagtgccattgctttcaatccttccactggtgctggcaccattattgattctggtactgtcttcacccggctagttgaaccagcctatgtagctgtccgggacgcattccggagacgagtaagggtggcgaacgtgacatctctgggtgggttcgacacatgttactcggtcccaatcaatgcaccgaccataacatttatgttttcgggcatgaacgtgac

SEQ ID NO: 17559 - DNA, 641 bp, Gossypium hirsutum
  Clone ID: LIB3831-001-Q1-K6-D12
cttggactgtctaaattagggaaaggtgattaccaaattgactacgttccagctccaaggatcactgaagctgacaaaacgaatgacagaaagtcattgcagagagcacttgatagaagattgtatcttcttttatacggtgacagtaatgcagctcctagcaggaaacccgtgtggcattttccagaaaaagtttatgattcagaggagacgttgcgcaagtgtgcagagtctgccttagcctctgtactcggagacctctctcacacttactttgtcggaaatgctcccatggggcacatggttatacagcagatggagaatgtgcctgaaccatttaagcgattttttttcaagtcacaagtgattgataccaacaagttcaatatccggaagtgcgaggatttcgtttgggtgaccaaagatgaactcttggagtattttcctgaggaagctgaattttttaagaagatgattatcagctgatggcaaattgctccattcatgtaactttgcagtagagagtttacatcagaagttcaagccgagactagaaaaccaaacatccgaacgtgagtcaattaggcgaaaataacgaaaacctcattggctaaggatggattggattgtccattactttt

SEQ ID NO: 17560 - DNA, 653 bp, Gossypium hirsutum
  unsure (1)..(653): unsure at all n locations; Clone ID: LIB3831-001-Q1-K6-D2
agttccgacaaaagaaacgaaaaaatagaagaaatcaatcgttttctttttgaagtcgggttttagtttttggggagaaaaaaatgttgggagtatttagcagtgcgatagtgtctccgccggacgagctggtggcggccggttgccgaactccatcacctaagataacggcggatgctctggtgaaacggttccttgagacgaactcctccggcgtgtccatgcagatcggagaccatgtccaattcgcttattctcaccataaagagtctcctttacggcccagatcatttgctgtgaaagatgaaatcttctgcttgtttgagggagcccttgataacttggggagtttaaagcagcaatatggtctggcaaagtcggcaaatgaagtgattttggtcattgaagcttacaaggcccttcgtgaccgagcaccttatcctccaaaccatgtggttggccatctaattgggagctttgctttcattgtctttgacaaatccacctccactttgtttgtggcttctgatcaatttggtaaggttcctctctattggggaatcaccgccgacggatatgtggcctttgctgtaatgctgaattgctgaaagtgcctgntgcaatctcttgctctttcctcaagctgttctact

SEQ ID NO: 17561 - DNA, 694 bp, Gossypium hirsutum
  unsure (1)..(694): unsure at all n locations; Clone ID: LIB3831-001-Q1-K6-D3
ctgctgaacccaaggaacaaaatgtattccgatcccaaacctagttttagtttccttatcctcctctttctttgtttacaacctctcatcttctcactatctaccgatgcctcacctccgcctactgtctgcatcgtcggcagcggcatcggcggttcctccgtcgcccacttcctacgccactactttcatccctccccttcccaacccagacctcctaacatcaagatcttcgagcgtagctacgtcgtcggtggtcgcatggccactgtctccattggcggtgaaacttttgaggctggtgcttcaattcttcaccccaagaactaccacgctcttaactactcgaatcttcttgggttgaaggtcaaaccgccgcctgcctcggaggatgatgattcgatgtcgcttgggatctgggatgggaagaaatttgatttcaaaacccttcaagtggattccaagtttccattgttgcagaagattgtttcctatgttaattcttttcgcatctttttccgctatggcttctctcttctaaagatgggcagcttcgttgagagtactgtggatagcttcttgaagtactatgaaagccctgaaagaagaccatctttgaaacagtggatgagatgcttaaatgggctggtttatataatctcacaactcaaactctgcaanatgaactcattgg

SEQ ID NO: 17562 - DNA, 664 bp, Gossypium hirsutum
  unsure (1)..(664): unsure at all n locations; Clone ID: LIB3831-001-Q1-K6-D4
ttcactcttcttctgtaagggacaacaagnaatagtaacactcaaggtatgggatgtctggtttcaactcccaagattctgggggaaataggcggaggccaggaaatattggggaagtttctgtatatgtaccaggtttacgaattcccaagtctgtggatttctttcaatcactcggtggtcacttgtcaaagacattagtggaacgccttactgccttgagaactcgtatagttgttatggctggccaagaagcacctacaattacaagaacaaggaggaaaactgctacacagcatgggggttcaacattggcagatcttcatcaggctcttgaagactacttgcctgtgcttttgggattagttacagatgggagtcagctacaatataaagtacagtttatttgggtaaatcaggaggatgatgctgaggaaacagcaatgtttaatgcttggtatgaggtgttgtcagtattgcatttgatggcgatgttattgttatcacaagccaacttattgcttcttcctaggacatctgctgatggttatcaaccaaaagtatcagaagaaagcaggcgagcttctattgatattttcttgaaggctgcggngtacttggattgtgctgtcagacatgttcttccccagttgccatctgaact

SEQ ID NO: 17563 - DNA, 623 bp, Gossypium hirsutum
  unsure (1)..(623): unsure at all n locations; Clone ID: LIB3831-001-Q1-K6-D5
ggtacgagaaagtagtttgatatgtatatacatatatgtgttagtacttggtcaaataccaaatctggttgactcaagaagtttcatattgatgattacatacagctattgaaacaaccttatggtcaattgaatggggcattgctgagcttgtgaaccatcccgagatccagcagaaactccgcaacgaaatcgacaccgtactaggacccggcgtgcaggttaccgaacccgacacccataagcttccatatctgcaggcagtgatcaaggagactctcaggctccgaatggccatccctctactagtcccacacatgaacctccatgatgcaaagcttggtgggtatgacatccctgcagagagtaagatccttgtgaatgcatggtggttagccaataacccggctcactggaagaacccagaagagttccggcccgaaaggttttttgaggaggaatcgaaggtagaagccaatgggaatgacttcaggtatcttccatttggtgttggaaggaggagctgtccagggattattttggcactgccaatccnagggatcacattggngacgtttggtgcangattntgagctattgcctncaaaggggcagtctaagct

SEQ ID NO: 17564 - DNA, 570 bp, Gossypium hirsutum
  unsure (1)..(570): unsure at all n locations; Clone ID: LIB3831-001-Q1-K6-D6
ctgactctgagtaggggtaacaaagaagaagagaaaagtgacaaaggccttagcttagcttagcttgggccttcccccaaaaagagaaaaatgttgtccattcgatccctttctactaccaagttggtggtgagaagctgtagttactactattcttcttccactgcatcggctgcggctgttgaagctgagagaactatccgggaaggccctaggaacgtctggactcgccaacagatcgactccatctaccattctccccttcttgatctccttttccatggagctcaagttcacagatatgctcataacttcagagaggtgcagcagtgtactctcctctcaatcaagactggtggatgtagcgaggattgttcctattgccctcaatcctctaggtaccatactggcctaaagccccacaagctcatgaccaaggatgccgttatgcaggcagctaaacaggctaanagaggctggtagtacacgcttttgcatgggtgcagcatggagagacacagtcggaaggaaaactaacttcaaccaaattcttgaatatgtaaaagaaat

SEQ ID NO: 17565 - DNA, 635 bp, Gossypium hirsutum
  unsure (1)..(635): unsure at all n locations; Clone ID: LIB3831-001-Q1-K6-D7
ccccgcgtccggacaaaatggatgtaggactaggactggcgccaacagttaantcacggaagaaaggactcactgagccgggatcactaactaatactaatctaatctaactaatactaatctaatactaatagaatactaatctaatactctaatactaatagaatagaaaaaatagaatagaaaatactaatataatagaaagaactgtcttttctgtatactttccccggttccgttgctaccgcaggctttacgcaatcgatcggatcatatagatatcccttcaacacaacataggtcgtcgaaaggatctcggagactcaccaaagcacgaaagccaggatctttcagaaaatggattcctattcgaagagtgcataaccgcatggataagctcacactaacccgtcaattttggatccaattcgggattttccttggggggtatcagtaaggaattggaatgtaataatattgattcatataggagggaaaaggttctctattgattcaaatgctgtacctatgggatagggatagagaaagaggaaaaaccgaagattcacatagtgcttttgatcgaaaaataatctgatttatttcgtacccctcgctcaatgagaaaatgggtc

SEQ ID NO: 17566 - DNA, 684 bp, Gossypium hirsutum
  Clone ID: LIB3831-001-Q1-K6-D8
caaaactcctgagcctgtcaagaaggatttttacggtgacaatggctcttacatgtacccgcaaacttatggttacatgtcatatgcgccgtattctattcccagtccacctcttcctgctatgggacatgatggtcagctacatgccttgcaagagtactactatccaagcccttattaccaaccacctctgcaaactagtcaagccaatgctcctcaagttgatgtttcgagtttcggtgcaactgatcaatcttccttatctgttgatacaaataaaggaaattcaaatggtataacaagtggtggatcagggtcattaaaaccaaccttgaagagttcctctctaaatcctaatgctttttataaaggaggaggcttgccaactggtaatctatctcaaggttaccaggatccaaggtttagctatgatgggaatcagtcgccaataccttggttagatatttccatgtctcctaatgggcaatctgaacaaactgcaaatggtgggttctcttcatatacaaacaacctctcatctgggcggaatcagaaccttcatcccttccctcatgtcatgaatatgcacaacgcaagaccatcatcaggtgtaggccaatcatatggatacatgaaccacatgtaccctaacaatgtgacctatggtcattatgggaatgccat

SEQ ID NO: 17567 - DNA, 683 bp, Gossypium hirsutum
  unsure (1)..(683): unsure at all n locations; Clone ID: LIB3831-001-Q1-K6-D9
gtcgacccagcgtccggcagcagcagcgccacactcttcacagtgctgatcaaccatggcggagcagaccgagaaggcatttctaaagcaacccaaagtgtttttaagctccaagaaatctgggaaagggaagagaccaggaaagggaggaaaccgcttctggaagagcattggtttgggcttcaaaacccctcgtgaagctactgaaggaacctacatcgacaagaaatgcccattcaccggcactgtttccatcaggggtcgcattttagccggtacttgccatagtgccaagatgataaggacaatcattgttcgacggaattacctacattatatcaagaaataccaaaggtacgagaagagacattcaaatatccctgcacatatttctccatgcttccgtgtgaaggaaggagatcatgtcattatcgggcaatgcaggccgttgtcaaagactgtgaggttcaatgttttgaaagtgattcctgctggatcttctggtggagggaagaaagcttttactggaatgtaaggtgtaactgttttcaatcatagttcgggttgtaggaacataaggagaagacattaaaatccctgaactgcctctagatatgaagaacctgggactattagatgtttttatgtttttggttttcctttcctattacttgntatgtttg

SEQ ID NO: 17568 - DNA, 593 bp, Gossypium hirsutum
  unsure (1)..(593): unsure at all n locations; Clone ID: LIB3831-001-Q1-K6-E1
agacacccgtagngtaattccttgagggatgctaaactttccttcaaagacatagatgaggttatccttgttggtggatcaacacgtattcctgctgttcaggaacttgtgaggaagatgactggcaaggaaccgaatgtgacagtcaacccagatgaagttgttgccttgggggctgcagttcaggctggtgttttatctggagatgtcagtgatattgtgcttttggatgtgagtcctttgtcacttggtctagaaactcttggtggtgttatgaccaaaattatcccaagaaacactacgctgccaacctccaaatcagaagtgttttcaactgctgctgatggtcagacaagtgtcgagattaatgtactccaaggtgaaagagagtttgttagggataataaatctcttggcagcttccgtctcgatggtatcccaccagcaccacgtggggttccacagattgaagtcaaatttgacattgatgccaatggtatcctctctgtcactgctgttgataagggaactgggaagaagcaggacatcactatcactggtgcaagtaccttgccaaacgatgaggttgatcg

SEQ ID NO: 17569 - DNA, 655 bp, Gossypium hirsutum
  unsure (1)..(655): unsure at all n locations; Clone ID: LIB3831-001-Q1-K6-E10
cggacgcgtgggttgccatttgccttaatcatcttcctctttctttaaaacttcttcctatttaatttctgactaaacttgcgctgaattccatggctactgcagaggttgtaacagctcaaactgcaatccatgaggagaaacctgaagaagtggtcaaggttgaagaaattgcaacagaagaggtggtggctgttgctcctgcaacagaacctgttgctgaagaaccaaaggaagcagtgcctgaagcagcatccgaagaaccccaggctccagaaactgaagccacagttgaaactgaatcaaaggaggtggttgaagagcccaaggctgtgactgaggagccagaagttgagaaaaaagaagaagagactcctgaggaaacagtagcagagccagttgcggaggagtccaaggagactactgagccaaccgttgaagaaaccaaagaaagcacagagtctacagaagcagcagtagctgcagcagcagaagaagaagtaaaagcagaagccgaagccgaagccgccccagtggaagcacccaaagaggaagctgcaaaggaagaagaggaaccagctgaagctcaagctgagaagactactaccgagtaaaataagcttgtaagatggngagtcaatggaagcttgtgtag

SEQ ID NO: 17570 - DNA, 617 bp, Gossypium hirsutum
  unsure (1)..(617): unsure at all n locations; Clone ID: LIB3831-001-Q1-K6-E11
aacgccttgagcagctagngnaagaccaanactgagaagagaaagccagctgcagttcctgctaacaagcgaacacgggccagtaatggcggtccaatgcctccagctaaagctggccgttcaacgaatgcatacgtctcatcttttgcagcaccaccgtcaattgtcaggtctccctcacaccctcagtaccctgctgcagtcccagcatacccatcccccccacctgccatgtacggaacccaaaccccacccacctgtccgtatatgtactcaccagaagcagcccctcagctagctggttcttaccctggagctcccatgaactatcctgcatatggagggtatggtaatggtatagcacctgcatatcagcaggcttactactgatagacgatgactactctggagattgtaactactgagatgacgactaccaaccgagctaagtttctttctaaatggtatttttgcttgtaatgaccaaccattttaatggtagcaatgcctgtgtgttaattattataattgttgtgtgcttcttgcatttgacatggtgagaagctgtatttctaatgttgagtggaacttatagtagttgtaggtgattgtgaagt

SEQ ID NO: 17571 - DNA, 638 bp, Gossypium hirsutum
  Clone ID: LIB3831-001-Q1-K6-E12
gccacctcagcttccgacccaaaggaaaaaaactgaaaaatacaactcgtccttgttgactcggttccccgcctttttttgttgtctcgaatcggtctcgagtttttggaactcagttcgtgcttggatctggtaaggcttttaaggtaaatcagaaactgtatcagaatgaaggcacttattcttgttggagggtttggaactcgattgaggccattgactctcagtgttccgaagccacttgtcgaattcgctaataaacccatgatcctgcatcagattgaggctctcaaggctgttggtgtaactgaagttgtgttggctattaattaccaacctgaggtgatgttgaacttcttgaaggagttcgaaactaaactcgggatcacgatcacgtgttctcaagagactgagccgctcggcactgctggtcctcttgctttggctagggacaaacttgttgacgagtccggcgaaccgttttttgtccttaacagtgacgttatcagtgagtatccattcaaagaaatgattgaattccacaaagctcatggtggagaagcttccataatggtaaccaaggtggatgaaccatcgaaatatggtgtgggtggtgatggaagaatcaacaggacaag

SEQ ID NO: 17572 - DNA, 271 bp, Gossypium hirsutum
  Clone ID: LIB3831-001-Q1-K6-E2
attttgttgagttcatacagcttggatgcatgctgcagcaattgtgcatgttgtagcaacatattttctgttttagttgcaatgtaatttagtttggttgaaaacgaagtgtttaggtgatgattaagctaataagtcagcttattcatatgtacaagcaatgttttactagtcccaatgctgattagtgggattagttgaatatttggtgatgtattttgattataaatgtattgttttcacattgaataagtaagcatatcagttgttt

SEQ ID NO: 17573 - DNA, 668 bp, Gossypium hirsutum
  unsure (1)..(668): unsure at all n locations; Clone ID: LIB3831-001-Q1-K6-E3
gtcttcttgtatctctttcaggattctgcttgtcgctgctttggttacatggtttccaagaagaagtacatttataccattgatgatgactgctttgttgcgaaagatccatccggcaaagacattaacgcactggagcagcacataaagaaccttctttgtccatctactccgtttttcttcaacactctctatgacccgtaccgagctggtgcagatttcgttcgtgggtacccattcagtctccgcgaaggtgttcccactgccgtttctcatggcctctggctcaacatcccggattatgatgcaccaactcagcttgtcaagcctcttgagagaaacaccaggtacgttgatgctattatgacaataccgaagggaaccctctttcccatgtgtggtatgaatctggcattcaaccgtgaattgatcggccctgctatgtactttggactcatgggtgatggtcagcctattggtcgatacgatgatatgtgggctggctggtgtaccaaggtcatatgtgatcacctcggactgggagtgaagacaggattgccttacatttggcacagcaaagcgagcaacccgtttgtgaatcttangaaagaatacaaaggaatttactggcaagaagagttgatcccgttcttccagtctgttaccct

SEQ ID NO: 17574 - DNA, 631 bp, Gossypium hirsutum
  Clone ID: LIB3831-001-Q1-K6-E4
ctccaccctagattcttataattgtgcttcccccctgcaaaggctttattcttcattcgcttcgttgaatttttatcttctttttatctgaacggagtttggtaatccagttttcgtcttcggttgattcaggaaatcttagtttttgaattgcgtgactgaatgatctaatggagtctaaaggtgggaaaaagaagtctagtagtagtaagtctttattctacgaagctcctctcggttacagcattgaagacgtgcggccaaacggtggaatcaagaagttcagatctgctgcttactccaactgcgctcgcaagccatcctgatatactcacaagcgtgccgtctgaccactagtagtggttaataaaactgttatttgctttgttagttagttttagattatttccccgaccaacttcttcctcttctctcttcgtggctggtttctttacattgcgttctcctgatttggcgactgtgtaattccgataaagtttgcagcccttggttgaatcacaatggcagtatctgcaattggatttgagggttatgaaaaaagcttgaaatttccttttttgagcctggcatctttgctgatcctgaagaaaagggtcttcgggcacttacc

SEQ ID NO: 17575 - DNA, 493 bp, Gossypium hirsutum
  Clone ID: LIB3831-001-Q1-K6-E5
gggaacaaccctaagatttgctcccattcagccgacgctttcaacatcacaattgatggatggcaccgttagattcccccttcctaatcacctattcatcttcaccggatggtgctcgtcgagcccggagaaatctcagcccgaaatccctcctcaacttcgatttcagagaagaaaggagaagaaatccatggcctgctcgcactgaacagccgtacggaggagtgaggaaaggtgtgcgtgaaagaggccgtgcggggaaatcgttcatgggagccggaccccttggtactattctggcacgttccagaagcttctagtgctctcggctgttgagattccccttttgggttctgtatttgggctaggtttaggatatgggtttatgactttgggttagaattgtatttggctagtataggttctttatttgagcctgaaattttgtaaaaggacattgatgatggacttttattggtttttatcttaattt

SEQ ID NO: 17576 - DNA, 686 bp, Gossypium hirsutum
  Clone ID: LIB3831-001-Q1-K6-E6
cctaaatcctcctttgttctaacgcaaatttgaatcatgacagacacctcctccgatctccaaaaatacggcgtgccgttttacggagccggatgggttccttacaaccacatcaaatccaagctcgcctcacaagaaaagattgaagaggataagaaagaagaaaaagatccaactccatccaacgatgacgagatcactacacccctaaactacgttgttctcgctggcggtggcggtgaaggccgtagtggcattcccaatgcaatcgttgtttcccacgttaatttcacctccaattctctctccgatcaacctgtggttaagcatgaaactggttctgatttgccttatcgaatgactgttcatccgcatggagatggcattatctgtgcatttcaacagagctgcaggttgtttgagtggaaagaatctaacggaaatgaagcccacaaactgggtgtcaaggtatcagagaaagttctgatccagttagaggatgttgggcaacagttggcactgacatttaatagtgagggttctgtactggctgttggtggtgaggatggcagtttaagggttttcaagtggcctagcatgaaaatagttctcaatgaagccccagctcattcatctgttaagaacttggattttagctgtgatggaaaatttcttgtgtcactggg

SEQ ID NO: 17577 - DNA, 638 bp, Gossypium hirsutum
  Clone ID: LIB3831-001-Q1-K6-E7
ctcgtcttccaagttgcattttagacaattagacagacacaaaggaaacagagaacgaaactatggcttccatgtctttctctgcaactattccgtctcctcttcttgatttttcccaaaccaaaaagaacccagttttttcttcatcatggccttccatgtctttctcaattccttccatcaaatcctcgcttgggtcttcaaaatcagcctttttccaaaatgggttctccttgccatcgcttactgcttctgggtttgtctttaactctagatcttcaggcatttatgcaagagcagctacggataaaaccctatacgactacacagtaaaggatattgatgggaaggatacccctcttggcaaatttaagggaaaagttcttttgattgttaatgttgcttcaagatgtggtttgacaacatcaaattactctgagctttcccacatatatgacaagtacaagaatcaaggatttgagattctagctttcccttgcaatcaattcgggggacaagagcctggatcaaatcctgatattaaaaaatttgcttgtaccaggttcaaggcagagtttcctatatttgataaggttgatgtgaatggaccaaatacggctcccgtttaccagtttctg

SEQ ID NO: 17578 - DNA, 694 bp, Gossypium hirsutum
  unsure (1)..(694): unsure at all n locations; Clone ID: LIB3831-001-Q1-K6-E8
gtcgacccagcgtccgcccacgcgtccggccagatctcgtcatgacagagaaagatggaccgatatcgagttcttatcatcagcaaagccaccaacttgggggtaccctgcatccaagacgttggctgaaaagcagcttggaaatttgctgaagaaaacaacattgatctcattacagttatcccttctctcatgactggtccttcccttaccccaattgtccccagcagcataggccttgctacatctttgatttcaggcaatgaattcctcataaatgctttgaaaggaatgcagatgctgtcaggttcgatctctatcacacatgtggaagacgaatgccgagcccatgtttttctggctgaaaaagaatctgcatcgggtcgatatatatgcagtgctgtcaataccagtgtgccagaactagcaaagttcctcaacaaaagataccctgacttcaaagtccctaccgattttggagatttcccctccaaacccaagttgatcatttcctcagagaagcttattagcgaaggattcagctttaagtatgggatcgaggaaatctacgaccaaaccgtggaatatttgaagtctaaggggctgctcaagtgaagcgctntgacgcttccccaatgattatggtgtttgactgttgtgctattgtgataatattcgaataacttcatgctct

SEQ ID NO: 17579 - DNA, 656 bp, Gossypium hirsutum
  Clone ID: LIB3831-001-Q1-K6-F1
ctcgtctcgtcttttcttttcctttcgcgaggcgagcgagccactgtaatcttttcctttcctcacaacttactcatcaggtctctttgagtcgaagccatggccaccggacagttgttttctcgaacaactcaagccttattctataactacaaacaacttcctattcaacgcatgcttgatttcgatttcctttgcgggagggaaacaccgtccgtcgctggtatcattaatcctggtgccgagggatttcagaaactcttctttggtcaagaggaaatagcgatcccagtgcattcaaccattgaggcagcatgtgctgcacatccaactgccgatgtttttattaactttgcatcatatcgaagtgctgctgcttcgtccatgtctgctctgaaacaacctaccattcgagttgttgctataattgctgaaggtgttcctgaatcagacaccaaacagttgattgcatatgcacgttccaacaacaaggttgttattggcccagctactgttggaggaattcaagctggagcttttaagataggtgacactgctggaacaattgacaatattgttcactgcaagctgtacaggcctggatctgttggctttgtctccaaatctggtggcatgtcgaatgaaatgtacaacac

SEQ ID NO: 17580 - DNA, 675 bp, Gossypium hirsutum
  Clone ID: LIB3831-001-Q1-K6-F10
cttttcatgctctcctttctcttctttttcttcttttttttaattttccccttttactttccgtttctctctctttcactgatacaaagtaagattttcctcagcgtctggcatgagctcaacaccgtatttctctccccaattcccctctctcgatgttttcgaaagaaaggaaagtgaagtattaccggtagaggggagtcaccggagctgggagactagaatcgacggtggtatggacttggactttcgccggcagccgcatgcggtggagttcgacgttgatttctggcccgttgaacatcctatggaaccacaagatgaagatcggcctgttaaatgcccaatgtcagctgcttcgtccatcaatgatggaaaagggcatgaagaaatggtagtcggagagagttcgcgtaagagatcagaacaaccacaaacggtgaacggaattggggtggcagcaatgatggagccactggtaagagcggtgcgtaaaaggcaacacacgctcacccgcgacaaccacataacggtggagcctcgtatcggaaaaccgtctctccctccgatcccgactccaactcttaccggttcccaaatgcttcaacaactagacaaagcttaactcatttaccaaaaaaaatacccatcttttttttttcaatgcatttggag

SEQ ID NO: 17581 - DNA, 602 bp, Gossypium hirsutum
  unsure (1)..(602): unsure at all n locations; Clone ID: LIB3831-001-Q1-K6-F11
ctttatcagatgcaggccaatggaaccttgttgttccctgctattaatgtcaatgactctgtcaccaagagcaagttcgataacttgtatggatgccgtcactctcttcccgatgggttgatgagagctaccgatgtcatgattgctggtaaggtcgctgttgtctgtggttatggtgatgtcggcaagggttgtgctgctgccttgaagcaagccggtgctcgcgtcattgtcaccgagattgatcccatctgtgcccttcaggctctcatggaaggacttcaagttttgacccttgaggatgttgtctccgaggctgatatctttgtcaccacgactggtaacaaggacatcatcatggttaaccacatgaggaagatgaagaacaatgccattgtttgcaacatcggtcacttcgacaatgaaattgacatgcttggtctcgagaattatcctggtgtcaagcgcattaccatcaagcctcaaaccgataggtgggtcttccctgaaaccacaccggcatcattgtgttggctgaaggacgtctcatgaacttgggttgtgctactggccaccctagctntgtcatgtcatgctcgttc

SEQ ID NO: 17582 - DNA, 649 bp, Gossypium hirsutum
  Clone ID: LIB3831-001-Q1-K6-F12
gttcgtattccgtaggacaccagtacgagaggggaagatccgtgtcggtgcttctccattgcctgacattcttatacaagaaagcttgacataactgcaatcatagccgagatttacatttgaagcttcaatggcgatttcatctctcccttgtattcaacctggatgcactagctacaactatcacttctaggaaggcaacgttcttcagtcgatcacgggcaacattgtggacaaaaggagaaacttccaacaatttcatcaacatttatgacatatttgttgattgtgatcgcgattctataatttacctttgggaagcctgatggtcctacctgctacacagggtcagagacatgctatttcacatcaataggtgatttgtttaaggagcaagaagttgaagaaactaacttggcattgacaactttatactcattagaggctacaatttccaaaagagagttagagttagcagggaaacatggaaagccttcgtggactaaacggctcttacttgatgaaaacttcttgtgctcaaaaatccgggaagaagcagatgagttgtgccgaatgctggaggagaaaaaggacagttcatgcattgcctcaaaatggcagatgtgatctaccatgctatggttttgct

SEQ ID NO: 17583 - DNA, 612 bp, Gossypium hirsutum
  Clone ID: LIB3831-001-Q1-K6-F2
gaaacgccacaggtcgtattcacaaaggtgtttgttcaacttggatgaagaatgctgtgtcctcggggaaaagcgatgactgcagctgggcacccatttttgtcaggcaatcaaactttaaacttccttcagatactaaagtgcccatcataatgattggtcctggtactggattggctcctttcaggggattccttcaggaaaggcttgcactgaaagaagctggtgctgagttgggtccatctgtattgttctttggctgcagaaaccggaaaatggatttcatatatgaagatgagctcaacaactttgtcaacagtggtgcactatctgagcttgtggttgccttttcacgtgagggacctaccaaggaatatgtgcaacataaaatgatggagaaggccaaggacatatgggacatgatttctcagggaggttacctgtatgtgtgtggtgatgccaagggcatggctagagatgttcatcgagctcttcacactattttccaagagcagggatcactagacagctcaaaggctgagagcatggtgaaaaatctgcaaatgagcggcaggtacctacgcgatgtatggtgatgattacgatgaaaaa

SEQ ID NO: 17584 - DNA, 671 bp, Gossypium hirsutum
  Clone ID: LIB3831-001-Q1-K6-F3
aactctttcaacaataatatccccacaacctcgccaaatctttcccattttcagtttccttcccttctcttagtaacagtcgtttctccgccggatcacaaaaacaaatatatatagcaaaagaccattgatatatatatatatacacggataatcatttgttttgtttgttaaacggctttttaacgggtgttacgtttatagagaagaacagtttgtcaatcacatagatcatgggttttctagacaaactttgggacgaaacgcttgccgggcctatgccagaaaccggcctcggaaaactacgaaagtatggttcattttcagccgcatcatcatcgcctgctaccgctgatactagtcaggttatgataactaggagcattacgattcttaagagtaactctggtttgaaaaacctatctatggacccgggttcagctccgtgttctccttctgggtctagcaatcctgggacacctttgtcaccggggacaccgactggggattttaggagattcacgagaaggaaatcgccggctgaagcacttcaatcggaagaacctagaagtccgactgtttacgattggttctccctctctctttttttactacttatgaaattgcaaaaataaaaattgtttgtaactgtttaaccaaaatatctttgg

SEQ ID NO: 17585 - DNA, 654 bp, Gossypium hirsutum
  unsure (1)..(654): unsure at all n locations; Clone ID: LIB3831-001-Q1-K6-F4
ccgtatcacaaatagtgagcacaaaaccgagttgaaagagaagttcaagcgcatgtgtgaaaaatcgatgatcaagaagcgatacatgtaccttacagaagagattttgaaagagaatcccaatgtatgtgaatacatggctccttcactggacgctaggcaagatatggtggtagttgaggtgccaaagctaggcaaagaagcagccaccaaggccattaaggagtggggccagcccaagtccaagatcacccaccttgtcttttgcaccactagcggtgtggacatgcctggggctgactaccagctcaccaagcttttaggcctccgcccctccgttaagcgcctcatgatgtaccaacaaggttgcttcgcaggggggacggtgctccgagtggctaaggacttagctgagaacaacaaaggtgctcgtgtacttgttgtgtgctcggagattactgctgttacctttcgtggacctagtgacactcacctagacagtcttgtgggccaagcattgtttggtgatggtgccgcagctgttataatcggngcagaccccgtgcccgaaatcgagaagcccatgtttgaactagtctcagcagcccaaacgatcttgccagatagtgatggtgcgattgatggtcaccttcg

SEQ ID NO: 17586 - DNA, 607 bp, Gossypium hirsutum
  Clone ID: LIB3831-001-Q1-K6-F5
gcccataaaaaaccaagaaacctttgttaaaccaaaaaggctctcaccaactcctccattcttcccaccaactccatccttcaatctcagccatcaacgccgttctctaaggctaagccattgtctgtccttcggatctccgccgtccattcttctgactcgcctaagaaccccgtcgtctccgacaaatccgtcaagcagcccgctactgctccactcgctgctaccaaatctgctaccgcgcccaccactgctccaccgaagaatgctgttcctgggaaatggaccgtggatagctggaagtcgaagaaggctttgcagttgccggagtatccggatcaggcggagctcgagtcttgaggagaagctcggggaagccgccatgggaaacgcttttctgttacaaggcggagattgtgccgagagtttcaaagagttcaacgctaataacattcgtgacactttccggatccttcttcagatgggtgccgttttgatgtttggtggtcaaatgcctgttatcaaggtgggaagaatggctgggcaatttgcgaagccgagatcggacccattcgaggaaaagaatggagtgaagctgccgagttac

SEQ ID NO: 17587 - DNA, 661 bp, Gossypium hirsutum
  unsure (1)..(661): unsure at all n locations; Clone ID: LIB3831-001-Q1-K6-F6
gttttgaatgacaaattgtgcaaattgttgatacaacttgtccttgggtaactaaggtatggaacgtagtagagaagcacaagaaaggagactttacttcaatcatacatggtaaatatgctcatgaggagacaattgcaactgcatcttttgctggaacttatatcattgtgaaggatatgactgaggcaatgtatgtttgtgattacattcttggaggtgaacttaatggatctagctccaccaaagaggcttttatggagaaatttaagaatgctacttcagagggatttgatccagatcgtgacctagtaaaagttggcattgcaaatcaaactacaatgctgaagggagagacagaggaaattggaagattagttgagaggaccatgatgcaaaaatatggagtgcaaaatgtcacagatcacttcttaagctttaacacaatttgtgatgcgacacaagagcgacaagatgcaatgtataagttggttgatgaagacctggatcttatgttagttgtcggtgggtggaattcaagcaacacctcacaccttcaagaaatttcagaggaccgtgggattccctcatattggatagacagtgagaagagaatangtccaggaaacagaatagctcacaaattgaaacatggggagct

SEQ ID NO: 17588 - DNA, 669 bp, Gossypium hirsutum
  unsure (1)..(669): unsure at all n locations; Clone ID: LIB3831-001-Q1-K6-F7
ggaccttgtttcacgcctcacactccaagaaaggttcaacagttggtgaacacagcctccggcattccccggctcggggtgccagcttaccagtggtggtcggaggccctccacggcgtgtcggacctcggtccaggcactcggtttaacgccacggtgcccggtgcgactagtttccccgctgtgattttatccgccgcgagtttcaacgagatgttgtggctcgagatggggcgagttgtctcgaccgaggctcgagccatgtacaatgtcggtctagccgggctgacatattggagccctaatgttaatgtgttccgcgacccaagatggggtcgtggacaagaaacgccgggggaggaccctacggtggtctcgaaatatgctgtgaattacgtgcggggattgcaagaagttggctccgtgggggacaagcttaaggtttcaagttgttgtaagcattacactgcttatgatgtggacaactggaaaggcgtggaccggttccattttgatgcaaaggttacgaagcaggacttggaagatacgtatcagccaccatttaagagctgtgtagtggaaggacatgtgagcagtgtaatgtgctcatacaatanggtgaatggcatccctacttgtgctgatccagaccttctcaaagcatagtta

SEQ ID NO: 17589 - DNA, 685 bp, Gossypium hirsutum
  Clone ID: LIB3831-001-Q1-K6-F8
ccctcaccaaaaaatttcaaacgacgaccaccgtccaccgccgccgaagaggaaagagccgtttaaataaaatatggacacaattctccataccgaacctctatctctcactcgcttacgcgccacttcgaattccaccgcttccattcaccatatgccttgccagctcatcttccgtcctttccaccgcctttcctttcctttatccaccgtcaacgccggctccagttctcgcaggtcatccacttttgttgtcgccgcttgcggcactctcaccgccaattccgtctcgccaagaggtggagtatatacagttggggatttcatgacgagaaaagaggatttgcatgttgtaaagccaacaacaactgttgatgaagcactggaagctcttgttgaacacagaatcaccggttttcctgttattgatgatgattggaaattggttggacttgtttctgattatgacttgctagcattggactccatatctgggcgacggactgagaatgacctgtttcctgaagttgatagcacttggaaatcctcaattttgcagactttcaacgaggtacagaagttactcaacaagaacgaatggccagtcgttggtgatttaatgacaccagctccattagttgtacgtgaaacaactaatctcgaggatgctgctagattattgctc

SEQ ID NO: 17590 - DNA, 603 bp, Gossypium hirsutum
  Clone ID: LIB3831-001-Q1-K6-F9
cagagtcataagcaacatcaatggctccttcaactctgacggctcttgcggaagagaaaaccttgcaggcaagcttcgttcgtgatgaagatgagcgtcctaaggttgcttacaaccaattcagtaatgatatccctgtcatctctcttgctggtatcgatgatgttgatggcaagaggggtgagatatgcaagaagattgttgaggcttgtgaggattggggtgtcttccaggttgtggatcatggtgttgatactaaactcgtgtccgaaatgacccgtcttgcgagagagttttttgctttgcctgctgaagagaagcttcggttcgatatgtctggtggcaagaaaggtggtttcatcgtctccagccaccttcagggagaagcagtgcaagattggcgagagattgtgacatacttttcatacccattgaggagcagggactattcaaggtggcctgataagccagagggttgggttgaagttacaaaggagtacagcgagaagttgatgggcctagcttgcaagcttcttgaggtgttgtcagaggccatgggtttagagaaggaggccttgactaaggcatgtgtggacatggatc

SEQ ID NO: 17591 - DNA, 635 bp, Gossypium hirsutum
  Clone ID: LIB3831-001-Q1-K6-G1
atttattttgatgaaagaatctctattacctccactaaaatcttgaaaacttcttcttcttcttcttcaccttgttatttaccgttgaattgcagtgtgttacacaagtcttttgtacctttggctgcttcagttactattcttctgtctccaattccaggattttgtttataaaattctttcttgggttggatatgccaaagctggattgttatcaggattccccggaatcgaatcaatccctggtcctcaattacctgaaattgagttcctaaatcgcttcaatgaagaaaaccagaagaagtacgctgaagctgatgcaagattcaagtcatctcccttgctgaagcagctgttagagcggtcaaagcagaacaaagaaaagaacaagcaagaaattcaagacaagtactgcatgcgcggggcggagtggggagtaggggattgttcagtggaggcaatgtcgccggaagacaaagaaaacttcattgcaatgttgaaggaaaaggctggaatcaaatgaaatggtcatttcaatttgcttggatatagatcaaagaagaatgggaagcaaagccaacatgcaagaacaaaatgtaatagcaatggcaatatatagcccttttttggtttaa

SEQ ID NO: 17592 - DNA, 635 bp, Gossypium hirsutum
  Clone ID: LIB3831-001-Q1-K6-G10
taaccttgcgtctaagcttcagccatggtggctgttgcttgtaattcccttcttgtttgtctccaacacttatcattgtgtcaatgcagaaccacaagtgccttgctacttcatcttcggagactcattgtcggataatggaaacaataacaaccttgcgacggaggccaaagtaaattattggccttacggtatcgatttccctaaaggacccactggaaggtttactaatggtcgaaccatgcaggatatcattgttcaactactgggtttccaagaatttattcctccttttgccacttcaagaggccaagagattctcaaaggtgttaattatgcatctggttctgctggaattctcaatgatagtggccaacatctgggtgttcgaataagcatgaacatgcagttaagcaaccaccaaagtgttatctcaacaatagttgagatgttgggaaattgtgcagcatcaaagcttttaggcaaatgcatgtatgcggttcaaataggcagcaatgactacattaacaactatttcaagccagagatgtacaacagcagccacctattcactccagagcaatatgctgcttatctcatcgaacatattcacggcaaataaagactctgtacat

SEQ ID NO: 17593 - DNA, 642 bp, Gossypium hirsutum
  unsure (1)..(642): unsure at all n locations; Clone ID: LIB3831-001-Q1-K6-G11
gcggtggcgagtatgggagagctagnnggcttgggaaacaaaagagatctacttcgactacgtctttgcaaggggaagagaatcggttcttgcaaaatagtaaggcttccttgagttcgattcctgataacgttaccagagaagatccttccaccaaatatgaattgctcaatgagctcgggaaaggatcttacggggctgtttacaaggctagagatataagaacttcagagcttgttgccattaaagttctatctttatctgaaggggaacaagggtatgaagaaattcgtggtgaaattgagatgttgcagcagtgtagtcatccaaatgttgttcggtaccttggtagctaccaaggggatgaatatctttggatagtaatggaatattgcggaggtggaagtgttgctgatttaattcatgttactgaggagcctttagaggagtatcagatagcttatatatgtagggaagctttaaagggccttgaatatttgcactcaatttttaaagttcatagagatatcaagnggtggtaatantcttgttaactgaacaaggagaggtgaagttgggtgactttggngtagctgcacagcttacaaggaccatgtcaaaacgcntacatttattggcact

SEQ ID NO: 17594 - DNA, 660 bp, Gossypium hirsutum
  unsure (1)..(660): unsure at all n locations; Clone ID: LIB3831-001-Q1-K6-G12
cggtcgcgtgggcggacgcgtgggtaaacttgtagcaaatttgattactgaagcaggtgcaaatcgtgttcttgcttgtgatcttcattcagggcaatccatgggttactttgatatcccagtagatcatgtttatgggcagcctgtgattcttgattatcttgccagcaagacaatatgttctgatgatttggtggtagtctcaccagatgttggtggtgttgctagagcacgtgcttttgcaaaaaaattatctgatgcacctcttgctattgttgataaaaggcgtcatgggcataatgttgcagaggtcatgaatttgataggtgatgtgaaaggaaaggttgcagttatggtggatgacatgattgacactgctggaacaatcgcaaaaggtgcagctcttttgcatcaagagggggctcgggaagtgtatgcgtgtagtacacatgctgtttttagtcctcctgcaatagaaagattgtcaattggtcttttccaagaggtaatcataacaaacaccatcccagtgtcagagcaaaactattttcctcagttgactgtcctctctgtggcaaaccttctgggagagacctatggcgtgttcatgatgattgctctggnaggtttgaaccctatgcaaccttgggcattgattga

SEQ ID NO: 17595 - DNA, 676 bp, Gossypium hirsutum
  unsure (1)..(676): unsure at all n locations; Clone ID: LIB3831-001-Q1-K6-G2
ggggacgcccttgaagctgtgtttgagaactgaaaatgaaggagcaagattcacccacaacaccgccaataccaatcacttcacagcaactagcaacgccgagtgttgtgaagaaagatagctccgtaactgctggattcttgggtaaaagtgggtacaaattctgggtcttggctgcaattctcctgcttgctttctggtccatgtttactggctctgtttctctcaaatggtcttctggtcatcttactgcattttccgatgacatcgatttctctgtctatgatgatcttgacgttctcgaattggaagaaagagagaaggtggtgaggaagatgtgggatgtttatacgcacagcgcaagcgttcgattgccgaggttttggcttgaagcattcgaggctgcttatgaatatctatcgagtgatgttcctggagttcgagatacagctatgtctgagattgctaaattatctatgcgctccctaaatcttgattcgccctctcttcgatcaaagagcatcagtgtagggaaagagaattctaacagaaaggagatatctgcaagcaggaggagcttataagtggagcttacggtccctgttgctgtaataaaaaaggatgctgtttcaacctctcataccacttcatgttcngaggacatagcattatcttt

SEQ ID NO: 17596 - DNA, 669 bp, Gossypium hirsutum
  Clone ID: LIB3831-001-Q1-K6-G3
ggcaccggagtatgcagttactggacgagtaaccacgaaggtagatgtgtttagctttggtgtgatcctcatggaattgatctcaggccgaagggcacttgatgaaactcagcctgaggaaagcatgcaccttgtgtcatggttccgtcggatgcacatgaacaaagaaaccttccggaaggccattgatgaaacaatccagcttgatgaggaaacgctagccagtgttagcacagtgactgagcttgctggccactgttgtgccagggagccctaccagaggccagatatgagccatgcggtcaatgtgctgtcatcactagcagagctctggaaaccagcagaacccgattccgacgacatctatggcattgaccttgaattaactttaccccaagcattgaaaaagtggcaagccttcgaggggaacagcaatgtggatgactcctcatcatttctgggaagtacagacactacacagaccagcataccatgccggccgccaggttttgctgattcattcgcatcagctgatgctcgatgaaagacacaaagaacaacaacgcaagtttctagtgtcaaatcgattgttccaagatgtttgggtttgttcattccttctacttcttcatttcccattacaaatcttgctctcatcagttatagttt

SEQ ID NO: 17597 - DNA, 635 bp, Gossypium hirsutum
  Clone ID: LIB3831-001-Q1-K6-G4
ccccgcgtccgggcgaacctttcgctcaacgattcgatatggagcagtggttacgtttcgaagaggcctgacgagaggaggaattttgatatcagagtaggcggcgaactgaactccgtcaacagcttgaagccgaaggtcaccgatttcaactctttcagcaacgatgggtggaaaatcggagccaccagcaacgccaacatcgggttcggtcccatcggtccgattggatctcagaataacgttggggtcaacggtgggatcaacaaagggatctattccaagccagggaacaacaacaataacttcaatgttaatttgaaagggagcaagaacaaaggagaagataatcatggaaccaagagtgggaagaagaacaccaacaagaaaaacaataacaacaacgacaataacaacgaaaacaaggatgggaaaagtgctgctgataaaaggtttaagacactgccaccatctgaatcattgccgagaaatgaaactgtcggcggctatatttttgtctgcaacaacgataccatggaggagaatctcagaagacagctctttggtttgcctccacgttaccgtgattcagtccgggcaataactccgggcctacctctgttcctctacactac

SEQ ID NO: 17598 - DNA, 668 bp, Gossypium hirsutum
  unsure (1)..(668): unsure at all n locations; Clone ID: LIB3831-001-Q1-K6-G5
ggcaattcagaagcctcttcaaaggaaggtagtccccagatcagaatctagcaacaatgcaaccagtaaccggcatcttaatgctgcagagaagcatcgacagaagctgaagaagatgatggatgagctgaatgaggagggtgatggtcgctctgctcctattgtcaaactgggggatgcctcaatggcatcaccatttactgcaaagcatgcatcagttgccccaaccactgacataattcgtcaaggacgcagcacccttgtgactacccttcaaatgttcaagatcctcggccttaactgccttgctacagcctatgttttaagtgttatgtacttagatggtgtcaagctgggtgatgttcaactattagtggtgtatttacagctgcatttttcctgtttatctcacacgctcgcccactacccaccctttcagctgcacggccccacccgaatattttctgctcctatgtcttcctttctctcatgggacagtttgctatgcacctgttattcttgatctcttctgtgaaagaggctgagaaaacatgcctgaggaatgcattgagccagaatcagagtttcaccctaatctagtgaacacagtttcatacatggtgagcatgatgcttcaggtagcaacatntgcagtgaactacatgggt

SEQ ID NO: 17599 - DNA, 394 bp, Gossypium hirsutum
  Clone ID: LIB3831-001-Q1-K6-G6
cgctcgtcgccagtccctgccaatttcagccaatagtaaaatccactcacagtcaccaaggacgcagagactggttcatgcagggaaggaagggagcaaaagcgacagaccactgtcatccagagacagaaatgccaaggcgactcaagtagagtggaggaggtgatcttattgagatttgaggagttgttggcactattaggttcaagattcatatgctttgtggtgtaaattaatagaacttgctttgaaactgaaaccgggtcgataggatgtgtgcgcgggttgagtgcctctgaaaattcaatgtttctcagtgtttgtgagtgaatttgagtgtaaatcaatagattttgaactttcaaacatgccgcaaaataatcatcgttgtgat

SEQ ID NO: 17600 - DNA, 640 bp, Gossypium hirsutum
  Clone ID: LIB3831-001-Q1-K6-G7
gttgtgggccactggctggctacatgaccggataagagtcgtagtttcaagtttctttgtaaaggttctgcagcttccatggagatggggtatgaagtacttttgggataccctattagatgcagatttagagagtgatgctcttggttggcagtatatatccggtactcttctggatggccgtgagtttgacctcatagataatccacagtttgagggttacaaatttgacccacatggagaatatgtccgaaggtggctccctgaacttgcaagattgccaacagattggattcaccatccatggaatgctcctgaatctgtactccaagctgctggaattgagctcggatcaaattaccctcttcctattgtaggaatagatgctgcaaaagataggttgcaagaagcactttcggtgatgtggcaacaagaagctgcttcaagagctgcaattgagaatggaactgaagaaggccttggagactctagtgaatcagtgccatttgccttccctcaagacatacaaatggaggaaaatgttgaaccagcaaggaacgatgctccagctacaactcggcgatccgaagatcagatggttcctagcatgacttcttctttggtgagaggcatacatgaa

SEQ ID NO: 17601 - DNA, 663 bp, Gossypium hirsutum
  unsure (1)..(663): unsure at all n locations; Clone ID: LIB3831-001-Q1-K6-G8
gagacttctggntaacataaaaagatactaattggggctttaaattcgtagaaatgactaggcagtactccccatgattccggtccagagtatcctcctatctgccgattaaagtaatgactatcaggaacgaaataatcctttactattttttagtttaagccccattcgtggttttatcagatccgaaagcagaataggaacgaaaaagaaacaataaagaataaaaaagaaatctttttttttattctttctttcatagatatagagagatctaatccgtgtcatgatttatgagctaatggaatgtttcatttttttcgtaatagaaaacaatgggttgaaatatctattgatattctacaagaagtattttattgaaggcttaagttattactcaacaaataaaaattgaaattatgaatgggcgagatcaattcagaagcactttttttttattcttcagaatatagcagacagaattccattggtataattttggaccttccaatctattttttctctatctattctacaaccatacgaagataaataatactgattcggtcctaaaatttatttgtgacccacgaggagccgtatgaggtgaaaatctcatgtacggttttggactagcgatgtaaacagtgatgttatcatcga

SEQ ID NO: 17602 - DNA, 640 bp, Gossypium hirsutum
  unsure (1)..(640): unsure at all n locations; Clone ID: LIB3831-001-Q1-K6-G9
atgggactcagttattcacatgnagactgatccatatgctatgcatttgcagctcctatattcccatggatccatagatttagaaggagaaagcaaaggactactctgtggcagcaacaactgttggcccttccaccttgaatttagcaccccatatctcctcttcttcagcaggcactgcagtgatcttgttcttaggattctcatagcttcttaatcctcctactgctgtggagtagaaacagccttgaggaaaagaagcaagagatttgccacaggcacctttcagcaattcagcattatcagcaaaggccacatatgtgcgaactgcttaggatcaactgcgaccgaggtgttatgcttgctgatgggaaaaccagattttccatcaacggcaagcctatctaccactttgttggaacctcgacctttagccaatatactgtcgtccatgttggccaggttgccaagatcagtccaaccgcccctcttgataaagtctgtcccattagctgtgggatatgtacaggttttggggccactgtgaatgttgctaaacccaaaaagggtcaaactgttgcagtttttggactgggtgccgttggtcttgccgccgctgaaggtgcaaggggttgtgggg

SEQ ID NO: 17603 - DNA, 635 bp, Gossypium hirsutum
  unsure (1)..(635): unsure at all n locations; Clone ID: LIB3831-001-Q1-K6-H1
caaaaagcagcaaactaattacaaagagatcaacaccaatggatggacagctcttccttataaagcatcttctgatattaagggaacagatagcaccatttgacatagaattttccgttacacacaaagaacttgatttctctcatgtgctggagcatctgcgacggatacttagaggtcaggcttcattatttgactggactagatcaacatcattagcaaggaccttatctccccgtgttttggaaagtcaagtagatgccaagaaggagctggagaaaagtttaaaagcaacttgcgaggagtttattatggcagtcactaagcaaattgtggatcctatgctgtcatttgttaccaaggtgacagctgtaaaagttgcattatcttctagtactcagaataaaaaagtagactcagttatggccaagccactcaaagaacaagcctttgctgcgccagaaaaggtggctgaacttgtgcagaaggtaaattcagctattcagcaagaacttccactggtgatagcaaagatgaagctttatttacagaacccatcgacaagaacaattcttttcaaaccaattaagacgaatattgtggaagcccatattcaagntcaatcccttttaaaa

SEQ ID NO: 17604 - DNA, 544 bp, Gossypium hirsutum
  unsure (1)..(544): unsure at all n locations; Clone ID: LIB3831-001-Q1-K6-H10
catcaatatagtggcattgcttcattgcctcctgtaatccaacttactggtttaccatgctgccatgctattgctgttatcaattgcattggacgaagcccttatgattattgctcaagatacttttcaactgagagctacagattaacctatgcagaatctgtcaagcctattccagatatggactgggctatgcagaatgattattcggaagccgtaatgactgtaactccaccaacacgtcgtccaccaggtcggcctaccacaaagaaagttggattacaggaggcaatgaagcgccaactccagtgcagtaagtgcaagggtcttggacacaacaaggccacttgcaaagagctcttgtaaattgttgtaaactgtacgtattgagtattcgtgttctgttctttaaagcttgcatcagtgatactgaatacatcaatatagtggcattgcttcaaaaaaaaaaaaaaaaaaaaaaaaaaaaaaaaaanaaaanannnaaaaaaaaaaaaaaaaaaaaaaaaaaaaaaaaaaagggcgg

SEQ ID NO: 17605 - DNA, 695 bp, Gossypium hirsutum
  unsure (1)..(695): unsure at all n locations; Clone ID: LIB3831-001-Q1-K6-H11
gatccctctccaacatggcttctaatcccaagtcttcttcgacatgaccgtcggtggccaaccagctggtcggattgtgatggagctctttgccgattgcactccccggactgctgagaacttccgtgctctctgcaccggcgagaaaggggtaggccgtagcggcaaacctctccactacaaaggctcatccttccaccgggtgatccccaatttcatgtgtcaaggaggcgactttaccgccggaaacggtaccggaggtgaatccatctatggagccaagttcgcggacgagaacttcatcaagaagcacacgggacctggcatcctttccatggcgaacgctggacccggaacaaacggatctcaattcttcatctgcacgaccaagacggagtggctggacggaaagcacgtggtgttcggacaggtagttgaaggcatggatgtggttaaagcgattgagaaggtggggtctagcggtgggaggacttccaagcctgttgttattgctgactgtggacagctttgaaaaaggcttattgaattgtgtttccttcataatatctggtctttttaggctccttttttttatgctatgctgcttctatggctactgggttntgggtgtttttaagaagnntgctgatgtagctttttcattaactgccataaataagataggctttattttc

SEQ ID NO: 17606 - DNA, 627 bp, Gossypium hirsutum
  Clone ID: LIB3831-001-Q1-K6-H12
gaaaactgaaaaggggaaaaaagcgtcgtcgtttttgcttcttcttcttctttttcttcttccctctctctctttctcagaagctcctctttcgttcttttgttcactaagtattgtaaaagatggccgacggtgaggatattcaacccctcgtctgtgataatggaactggaatggtgaaggccggttttgctggtgatgatgctccaagggcagtttttcccagtatcgttggtcgtccccgacacactggtgttatggttgggatgggtcagaaggatgcctatgtaggagatgaagcacaatctaaaagaggtatccttactttgaaatatcctattgagcatggtattgtgagcaactgggatgatatggaaaagatctggcatcatacattctacaatgaactccgtgttgctcctgaggagcaccctgtgcttctcacggaagcacctctcaaccccaaggccaatagagaaaagatgactcagatcatgtttgagaccttcaacgtacctgctatgtatgttgccatccaggccgtcctctctttgtatgccagtggtcgtacaacaggtattgtgctggattccggtgatggtgtttctcacactgtgccaatctatg

SEQ ID NO: 17607 - DNA, 663 bp, Gossypium hirsutum
  Clone ID: LIB3831-001-Q1-K6-H2
aaattggggtttgctgtaatagtactagtagttaaagctgctttgcttgtgcagctttcactgttgttactgagcaccttcactgtctctgctcccatttggcctcaggcttctcctcctcattaccatgctgtttcacctgtagtcccgcctactcacccaccaacccaccaccatcaccaccaccctcaccctcaccctcacccccatcctcatccacccactaagcccccaacccccactcctcctccagttcatccaccacccaaggcgccagtgcaaccaccaaccaagccaccagttcacccaccacccaagccaccagttcaacctccaactaagccaccaaccaaacctccaactcaacccccgactaagccaccaactcagcccccgactaagccaccaaccaagcctccaactcagcccccgacgaagccaccaacacacccaccatctcatcctccggccaagccacctaaatcgagccaggtggcagtgcagggcgttgtttattgcaagtcatgcaagtacgccggagtcgacacccttttgggagctaaaccaattcttagtgccaccgtaaggctgacatgcaaagacgctaaaaacgaattaacggtccagttcaagactgacaagaatggttatttcttcctgcag

SEQ ID NO: 17608 - DNA, 667 bp, Gossypium hirsutum
  unsure (1)..(667): unsure at all n locations; Clone ID: LIB3831-001-Q1-K6-H4
aactattactattacttaaaatcagttcccaagacaatgataaaccctagctagtgagtagccaccaccaagcttaaaaacagacctcacaaaagtcggaattggtttgttggtaggattgattgactactactctgcagatttcgtcccatttgcagagtgaggctgagatttagggtttagcagaagtctgtaaatggaagaaatcacccaaggtgtcaacaacatcaacttggtcgccgattcccacaagaagaatcggattcaagtctcgaataccaagaagcccttgtttttctacgttaatcttgccaagaggtatatgcagcagcacaatgaggtggagttgtctgcccttggcatggctattgcaactgttgtcacaattgcagaaattctgaaaaacaacggtttagctgttgagaagaagatcacaacctcaacagttgacatgaaggaggactcaagagggcgaccagtccaaaaagcaaagattgagatattgttggggaagacagaaaactttgatgaattaatggcagcttctgctgaagaaagagagattgtggatggagaagtgcagggttgaaacttgaagaagtttgtttgttagtttgtggtggtcagntcttattgtcactgtatggttaaatgtaaagcaatttgg

SEQ ID NO: 17609 - DNA, 651 bp, Gossypium hirsutum
  Clone ID: LIB3831-001-Q1-K6-H5
gagatcttgagtctgctgtcactgtgtggcactctagtttctgtcgcttaataaaatttcaacgtgattctatctgctccctccatggctggttcaggctttcccttctccctctcagcaacgacaatgttgatggcaatgcagacccttctggtgtatatgcattttgtgacgagtggaagcttgctcttgaacgtgtacctgacactgtagcttctgaaggtatcaaaagtttcatcaatgttgtccgtgtgatatctgccaaacaaactgaagagcttaagattaagaagcaaacagaaaatgcatcaaaggagcttgagaaaaaggcatcatctctccggaacatagaaaggaagttctaccactcgtactctatggttggtatggggcctcctgatttaggatctgatcatggaccggttctggatgctcgggatccccttttctgaaaagaaatcagagcttgcagcctgtcaaaggcgggtggaagatgaaatgatgaggcatgccaaagcagtagaggtaactagagcaatgaccctgaataatcttcaaacaggcttgcccggcgtttttcgagcattaaccagcttttctggtgtatttactgaggcacttgacacggtatgctcccgttcctatcatatc

SEQ ID NO: 17610 - DNA, 663 bp, Gossypium hirsutum
  Clone ID: LIB3831-001-Q1-K6-H6
gttgttggtcttctgcaaaatgaagttgatcccatggtgtcagttatgaaggttgaaaaggctccattggaatcttatgccgatataggaggtttggatgctcaaatacaggagattaaagaggcagttgagctccctctgactcatcctgaactgtatgaggacatcggtatcaaacctccaaaaggagttatcttgtatggagaacctggcactggcaagaccttgcttgcaaaggcggtggctaattctacatcggcaactttcttacgtgttgttggcagtgaattgattcagaagtacttgggagatggtcccaagttagttagggaactcttcagagttgctgatgacctttccccttcaatcgtcttcattgatgaaattgatgcggttggtactaagaggtatgatgcccattccggtggtgaacgtgaaattcagaggactatgttggagttgctgaaccaattggatggctttgattcgagaggagacgtcaaagtgattcttgcaacaaaccgaattgaaagtcttgatccagctttgcttcgtcctggtcgtattgataggaagattgagttcccccttcctgacatcaaaacaaggaggcgcatttttcagatacacacatcaaggatgacattggctgatgatgtaaac

SEQ ID NO: 17611 - DNA, 656 bp, Gossypium hirsutum
  unsure (1)..(656): unsure at all n locations; Clone ID: LIB3831-001-Q1-K6-H7
ccctttcattgcttccttgcctgccttaaacctccttcaagcatagccatgactactgaaatggtaatggttgatgaagtcccttttcctccacaaatcacaactaccaagccactatctcttttgggtcatggaattaccgacattgagattcactttttgcaaatcaagttcacagcaattggggtttaccttgaaccagaagttgtaggacatttgcaacaatggaaggggaagcctgggaacgtgctagctgaagatgatgacttcttcgaggctcttattaatgctccagtggagaagtttctgagagttgtggtgattaaggagatcaaaggttcccaatatggagtgcagctagagagtgctgtgagggaccgattggcagctgacgacaaatacgaagaggaagaggaagaagccttggaaaaagttgttgaattcttccagtctaaatatttcaagaaggattcagtcatcacttaccattttccagcaaattcagccactgctgagattgcattcacgacggagggaaaggaggaagcaaaaatcaaagtagagaattcgaatgtggtcgagatgatcaagnaatggtacttaggaggaacaagcngagtgtctgcaactaccatttcctgctgagctaataccct

SEQ ID NO: 17612 - DNA, 623 bp, Gossypium hirsutum
  unsure (1)..(623): unsure at all n locations; Clone ID: LIB3831-001-Q1-K6-H8
gaaccattgctgtgagagttgctggcaagccaccacaacctgctgtgcctcctggtccacccacattgtcaatgcccgcttaccctgtctctagtcagccagttggtgcctatccatcacgacaatttacaactggaggtcctattcctaatgctgctcctgctagttatgcgggaaatccagttccatggggaccaccagttcctcctcctcccccttatgccccttatgcccctcctccccctcctcctcctggctcaaccatttatcctcctgttcatggtcagcctatgccaccttatggtttgcaatatcccccacaaatgcagacggttcctcctggtgttgcacctccacctccacctgtgacttctagtgaaacagcacaaagttttccaccaggagtgcaatctgaaaatagcacgtctgccccagctatgcctgctaatatctacgggaactcaatgactgcaatgcctccaaattcacaatctgcatatcctacatcttctttaggttactcttcttattacaatgcagttcccccccctgcccctcctccactacctacatnttccacagataattctcagagccttagtaatgtcccttgggctccaaac

SEQ ID NO: 17613 - DNA, 507 bp, Gossypium hirsutum
  Clone ID: LIB3831-001-Q1-K6-H9
cttgagtccagtggagctgttgatgctctcaccaaagttttggttgcattgtatgaacaaaatgagaagccatcttcagcccttgagttcatacaacaaaaattagggggtccaactatatatgaatatgaaaagctacaagctgagatttcagatttgcaaacaaagtacaatgagctattgtgtaagcatgaggatgcttgcaaagagttagaggagcttaagaatatgcattcttcagtttcaccatcgacaaaggagactaatgatggggagccattgaaagatgagcatgttgagaagaactcatgaagcagttcttcatatggttgtgatctactgctaatgactcattgtctctattaatgtctgtaaaatatttgttgatttgcactttgttactcattgttgataccccatttatatctgtgtgagtttatccgtgcatttgaagggatacctatatgattatgtggatgattcgtatttattgtatttgcagtgtat

SEQ ID NO: 17614 - DNA, 517 bp, Gossypium hirsutum
  Clone ID: LIB3831-001-Q1-N6-A1
ggaaccaagagagaatccccttttttattgttttcatggcccatgctaggctagctagagctgcatgctgctgcaaaccaactagtcatcaccagcaaaattactaagttattattaacttggaaattcgtctcgcattaatctaacctagaaaacatctctctctctaataagcctagcaaacctggtttaaatatttttaacccaaaacacacacttttattcctccataattatcttttcagcccctcctgatgaaaagtcttaaactgaatataattcaacttttatacaccactctgaaggtgccaaaacattcaatattttgattatatataaccagcagtttccctctttagatcaagaacgttccaagtttgacagcctggtcaatgagttcacactttgaatcaattgaaatgtggttgctcaagccatggccaaaacccagtttgatcttcaatggtgcagaacatgttgctgaggctttcttctttaaccatttgatccatctttt

SEQ ID NO: 17615 - DNA, 618 bp, Gossypium hirsutum
  Clone ID: LIB3831-001-Q1-N6-A10
gaactaaacagttcctttattaattttaaaacgagggagtaaacatattacaacgattcaaactgactgcttcgagtgaatcggattacacagtgacaccagaattttcacccatttcacaaatatcaccatcggcatcgttgttgtttggcagttgtgccattttcttaacattaaagggataagctatggcattggattcagaatcgtaagcctcaactgcaatgacctcattccatgcatccgaagtatgaaccgcatcccaaaacacgtactgactacggtcaccgcatggctccgaacctgggatacaaagatctccaccactccctatgtcacagcagctagcatttgccactgtaaaaccaagggagtttgctgcgcttgctcccgtaggatttagatacgtaaatttagcgtcggtggagttgctattcagttcatcaacaagcggtataagcctctcattgaaaagttgagctgcagtgttcattttttctacgcaggcagatccatttgttccatgcaccgccattgcatttggagtgcaccctatggcaccaattccgaacagtgcaaacatccttgcgccgttattgtacaaagtctttattttcc

SEQ ID NO: 17616 - DNA, 624 bp, Gossypium hirsutum
  unsure (1)..(624): unsure at all n locations; Clone ID: LIB3831-001-Q1-N6-A11
aacttaacatttgattccttgaaccaaaaggaaacataagcataataaatatagatctttttggaacaaagaaagagatggagagagcgagggagagagagaagggagatttaattaagaagggctgccaacaatgtctacaaagactcggttgagtgatggcaaacgcattacttgctcttgggctctgctcttcttaaaaggtgactgctgctcaggcgataaggacaccgtgccccaagaatcgttcgagctatcactgccaaatgcagcatcaatcactccactagggctgctaggaaccctctcctccaccttcctcttacatgcaccaccattgccttgggcctggggtcttgttgatacatcaaggatgagcttgtaacaatcgtttactttttccttgctaattttaagaacactcagcagctgattttggtagtcaatgggattgaaaagctcaacttggtctatgacgtgcatcatggttgcagtagccaatacagagggaagataatggatgggtcttgaatcagtgattacacagaggaggagatgctcacatcgcttaagaaactnccaaggaggtgggttttcaacccaagtcttcttatgatgtgatct

SEQ ID NO: 17617 - DNA, 614 bp, Gossypium hirsutum
  Clone ID: LIB3831-001-Q1-N6-A12
agtgatgaaaataaaaaacttagatatatttgagtgactaatactatagtttaccctaatatatttaaaatccaaacatcaacacgtgggaaaacagccaaacgacaatgattcccctacttttttttcttacactcaaattcaacaaagatatttttgttcttccttttttaccctctaaaaaaaccagcataaaaaataaaaaaaacaggcggggaaagagctttttcacttaccaattaccataggggtaagaaaaaacaaccgccattttttaagcgcatccattgggcttaaacccgatccgagagcccgctaaatcataagcaaccagaaaaccttgttgctggatatttccaattatggacaaaccactcatggtaccggcgaaagcaaagcaaaatgtcccactgctatcgaccggaatcaaatagttcgtcgccggtaatgacacgtcagctcctctgaaatgtaacaccactgtcggtactttaactgaagtcttaccggaaaagtcgtaacatgtgtcgaatagtgagaaagcgggtgcccgtttcaggttcgatgacccgagacggaaagcattccttaatgcgatgtaagcgggtcgggtc

SEQ ID NO: 17618 - DNA, 582 bp, Gossypium hirsutum
  unsure (1)..(582): unsure at all n locations; Clone ID: LIB3831-001-Q1-N6-A2
gttatccttcaaattgcactcactaaaaaactgtagaagattacacactaaaaaagatttcatattnaagaaagaaaagaaaaaaaaggaaattagattagattggtaagaatcagagttgatgaagcactaccctgtgtcaacaaccttcccaagaacagtggttcattgcacagcagtgcaaattgtaacaactaactacacaagctctttccatcatcatggagaagtcatgacttggtttcggattcggcttgaacgcctaactggggtcactatcccttcttctcttcctctatgctttctgggtatcttatcgtacgtggtaacactaccataggacgacgaacccgtggagtaatcggataaagccgtagattctctcctgtaagtagtcttcctcctttcttggctctgattattttcatttaaacctgctgccactgaaggctttcctctctttgtgtagactaaagctgaagctgctaatagacacaacacaagcaaagcaaaacccgtcgtattcttcacgagaaaaccgtcctctggtccattgattgtggaatcatctactgaaatttg

SEQ ID NO: 17619 - DNA, 594 bp, Gossypium hirsutum
  Clone ID: LIB3831-001-Q1-N6-A3
aagcattccgtgataataaaaacagttcataaggtaaggcacatcaaacagtaaataaaagtgagtgggcatcatacaacccaaaatagaacaaaaaaatttaagagataatggaatgtagcaatcactcattacactgagaattatctaaaattatcgccatcattgcataattgtcataaaacaccaacagccatgtcacctataaaatgaaaaacacattttctttgtcgcaaaaccagtgagtgcagggtgtttctgcccgcacaaggagacgatgaatttcttgtatagcagcaacatattcatattcatattaatatatatatttgtatatagacggggcacggtgaatcgacaactaccgcctcaagctctccacgatgtagtccgcgtagagattcaaggagtgttggattgcctcgtatgcagtagaggcaggcagaaagtcattaacagcaacttctttgttctcattcttcttatagtcttcaaagaagcgacggatttcagccaggcggtgaggtgggagttccttgatatcattgtagtgacgatactcaggatcatcagcacagacagcaataatcttgt

SEQ ID NO: 17620 - DNA, 615 bp, Gossypium hirsutum
  Clone ID: LIB3831-001-Q1-N6-A4
aatctactacaattctgccaactctcatcagtatcatcagcttacaggatcaaattttcagcagtattcaaagaccattcctcatgatatgcaaagttcagcaaactcggaaatgcaactataaatgtacaataagcttgttagacagctaatagacatacacccaacctagagtcaactgggctaccatacaactaatatagtatttataattcatggcgaataaatagtcttcagtcacttggttgaggtcgtgactccaagaataatcttacagtcgagtggattagagaaggttctgccattgcgccgtttccatagtccccacaagctagtcttttggagacaggggggatgagagaaataccaagctcatcaattgtcatgagatgcttttctgtgaaagggttgctccacatgaaagtgttcatagctggtgcaacaaacattggcttgctgtagtcccatgctcgtacgacacaagttaacaaattgtcacataatcctccagcaatcttgccaagtgtgtttgctgacaatggggcaatgaccataatatcagcccatcgacgaagctcaatgtgaagcacactgtcacctattttccccccacta

SEQ ID NO: 17621 - DNA, 590 bp, Gossypium hirsutum
  unsure (1)..(590): unsure at all n locations; Clone ID: LIB3831-001-Q1-N6-A5
agaattccaacagattgtgtatttataatcagcaaaaaaataagttttgctacttggtgacactagttaaacatagagttctaatggatgaaatgaaatcatcaaaacttcccaaaatacaggngaaagacactcgtaaaccttcctcgacctcgactttctactaatcaaattcttccgaacatattaatgcaatggaagaaaacacgaaaacagaacctgctaacaactcgtgttccttgaactcacgatttcggtggtgtcttaaagttctgtcttaccggactttgattgagcagctttaaatcctttccaccatttttgtaccctaaaagacaccttagttgcatgtctcttcaatgtttcacctgcatcttttacacctttgatgatgttctgtttccaatcggattgtttactttctttgtctctcaacacttttcccaaattcgatggaaattggtcctcgtcttcatcttcatcatcgtcagcatcttcaccgaaattcttcatgttcattagctcctcccttgaatacatttgcatgttgggtgctcctggcataccctccatggatcgtaacatctttt

SEQ ID NO: 17622 - DNA, 617 bp, Gossypium hirsutum
  Clone ID: LIB3831-001-Q1-N6-A6
gtatgaaaactttcattatttaattattaaagattgccaatggcagtagaatggataccgacacttagtttggagaatacataatgctgaaataaaaaagcatatggatccatgggaacgctcaagcttctggcagtggtttcccactaagaactgccttaaacagtgccattgatcgctctggctgtgaagctggagcggtgtgtgaagctcctctgatggtggcaaaggacaagatatcaccataaacttgtgtccacccaccaacttgtttcccttcgaaccaaggtcggtaaggcaccgttgttttaagtcccaatgctttggctagtttatacactaagtttctggtaccagtaaatgggataacagaatcctgatctccactgtaaaccatgacgggaataccggacttcactattttaccaacagtataaattgttggtgtctctaggtcgtccatgtattgcacaatcttgttacataagttccagccggtgattccaacaagttttgcatgtaaagctttctgcacatctttcctgttcaagtatttggttgttttgtcttctatacaagggtctgcttccactttacttgctgttgactgaacccat

SEQ ID NO: 17623 - DNA, 548 bp, Gossypium hirsutum
  Clone ID: LIB3831-001-Q1-N6-A7
agctaagaatttaatctttatttgtaatataacaataaagtacaatgatgaagtatgacaattttaatttattctcgtacatttattctaatcaagtggagcagaaccaagacattttcacaatcgatcagaattgagtttgtaaatagcaccttagtaatgaactacagtaacgttaaattcaataatgacattggtggcatttataaggatagggttaaatagtgcaacccctcttgccatcatgaatcgtcctcttcctccgaccaccgctagcccaggttctcctcttgaaaatacgcttagagagctgccgttaaacttaccggtattgaatccaaaatctatgtattgtgtgctcgatgcattcattccagccaggagcgcaataccctgaacatttccaatcaccttcgagtcaggctcaggaccagtcctgaggggatcattaacggcaaccagggaggcaaatggcactgatgaactattgcttgtgatgttagcttgggctaccacgactgctgtaacacccgtatgttcatgcataa

SEQ ID NO: 17624 - DNA, 628 bp, Gossypium hirsutum
  unsure (1)..(628): unsure at all n locations; Clone ID: LIB3831-001-Q1-N6-A8
acataaatatcactacatattaatcatcaaaaaaaaatatatcactacatatcaaaccggatgtataaattgttgtcctagatcaaccccaaagcaaggcaagaacatgaccaaatgacagctttaaaaatgtataaacaggtatgtgtgctgtttcagtgaatgtagtcaaagctacgtgtttcatataggagaggaagagggtataaaaaacctggacaaaattcaggacatataactgcaaaactagatagtttgtgagcttgaaaataaactttacccaagtcttaataagattttgcaaaaatggcaacttcgtcagcaggcttgcctgtcatcaagcatgctttggtcccctgaggctgttcgaaggggaaacagcgaatcgttgcccctgtttcttcttttatccgtaactcatctgcatcactagcagaccaaggacccctagcccatttgcccaaagatattgcttctttgagttcttcataagagctcacatccactatgttactgtcccggaaagaattgccctctgaagaagagagattggatctcatccaatctgtctttgacataagcttccaatattgaaggttccattgatattccaaaaactntcccttgc

SEQ ID NO: 17625 - DNA, 599 bp, Gossypium hirsutum
  Clone ID: LIB3831-001-Q1-N6-A9
ggacaatcatagtaatagaaatttatttcattaacaaagcaagcttttacaagataatttattctctcagcatataatataaaactccatataaagaactcttttctcttttttttttttttgagagagagagagttctatgtgggcactcttgataaccgggaaaggtagcttaagtaggcacataatataacacatagtaggacaaaacattagagttttgatccttggatgggcaaatatacagcagcaacatttccttaagcatccaaatgaatcatgcatctcagacctataccctggagcatgtagtcgaatgccttgttaatatcggcaaaaggcacagagtgtgtgatgaacttgtccatatccagccccagctccttgttcaaatatttgtcgacaaccatgggaatatcagtgcgtggtttatagttgccataaaaagcacccttaagggtcctctcacttagtagattcattggatgagttttgaatgcatcgtctttctttggcacacccaccagcacacaaacaccccaaccatcatgggacgcattcaaaagcggaaatcatggcttggacgctccctgtacact

SEQ ID NO: 17626 - DNA, 232 bp, Gossypium hirsutum
  Clone ID: LIB3831-001-Q1-N6-B1
gttgaagatgaagattgaattcaaaaggcaatcatcagcacacagaattgaattaaatacacaaacaagggagaactaccaacagaaaaataatgtaaacagttcataccaagagtgctttctattgacactctttttactttttagttgttgttgcaattccgagttaactccgagaactacttgccaacctccttaatgtgcaagccacataactcctgccactcataag

SEQ ID NO: 17627 - DNA, 615 bp, Gossypium hirsutum
  Clone ID: LIB3831-001-Q1-N6-B10
aataaaagaaccaaatcagctctcattattcaaataaaacaggtaaagaggagccaaggagtggagacagacgccacaaccaagggtttaaccccccaacgaaatatagcattcatcagagtacagaaagaaataggttatcgcgacaaataaaaatactagtttcagttggacagattatcctgggtcttcctgaacagcttatgctcgcccacgcgtccgcccacgcgtccgctcaactaaacttataacgttcgatcgtttaacgcaaacccatttttaagtgagggaaaggtttcagttcagagtcataagcaacatcaatggctccttcaactctgacggctcttgcggaagagaaaaccttgcaggcaagcttcgttcgtgatgaagatgagcgtcctaaggttgcttacaaccaattcagtaatgatatccctgtcatctctcttgctggtatcgatgatgttgatggcaagaggggtgagatatgcaagaagattgttgaggcttgtgaggattggggtgtcttccaggttgtggatcatggtgttgatactaaactcgtgtccgaaatgacccgtcttgcgagagagttttttgctttgcctgctg

SEQ ID NO: 17628 - DNA, 605 bp, Gossypium hirsutum
  Clone ID: LIB3831-001-Q1-N6-B11
aattaaaagaatagtaattaagtgggaaggaattcattcaaagtacaaactcaagctaaggcagtacaaacacaagcaataatagtacaatctctaacatgtatgagaagctcaagcttaaactcgaactcgattaattggacaatggcagactttaacatccgtagtctaaagattttccattggtgtgaatgggatattctttggtcttgaaacctgatacgccacaaatatagccacacaaagagctgctactgagaataaaagagaaaaggcagatgcagcatcccaggagctgcttgatttcgcagacttggttagcttagaaccacctgaagcaatatcaaacgacacccaatcgcagttaatagtatagtgtccagatccactccatggattcccgtcaaccggataccagagtgcaaccgacatcttgcttgatccacctattgtgaactgaacatcctgttgaagacgatccatggttcttaaaggcctagaaaattcgaaataatacgttcccttctgacctcccgtggaaaaaggctgtcatcctccacaaaacctgaatgaactgtgaagctactgtgccaccatgccccttt

SEQ ID NO: 17629 - DNA, 580 bp, Gossypium hirsutum
  Clone ID: LIB3831-001-Q1-N6-B12
aggaatcaaggagttaactgcaatcaaataactggaaagcaatcgttggatcataaatacaaattctaagttaattttagctgctgttattcacctaaacataatagtcaaaaagttaaaaagttgagagaatattaactagagagaaagtaaagcttacagcacaaactttactccttaatcattcaacaacacttcttaatggcgataggagcagctgcacaaattgctgatccacagttacaagatttgaaggaaccaattcgcataaacgacaccagtgataccaccacggtcttaaccttaagcaccatcttcttcagtttccgcgactttggcttgggttgtccccagttgttgtccatggctgataacttgtatgacctcaagaaaatctgccttttcttagctcgatctcgcctgtaactcagggaagccaccacgctgtgaggtctcctcttggaagacgtcctatattgagagggattttcttcccttgtttcgccgctttgatccaacagttcgtacccatccactctacggctaaaattggatgtggcatttcgcggacgcgtgggtc

SEQ ID NO: 17630 - DNA, 578 bp, Gossypium hirsutum
  Clone ID: LIB3831-001-Q1-N6-B2
ggtagaatagtttgcaaagtaacttattattgccataaatttaatataagttgatacatgaactgaataggcgttaagcttcccgcccacaccatcaaaggcttctagtctttaacaataaacacacaaattcataggattctaaaaaaggaaaaaaagaagaagataaaactgcaagccaagtggagcacgaccaattacttaaaaggcatgtttgtttaactttaagcagcaacactatggagcacaacagtctcaacagtgaggccaggtccaaacccaaagagcactccccactccaatccttctcctgtggtctgaagcccatcttcccttgatttcttcctcatctcatccaaaataaatagaacacaagcacttgacatgttaccatactctgaaagaacgtgccttgtggctcgtagcttctctggcttcagtgctaatttggcttctacttgatctaatattgctggaccaccaggatgagcaatccaaaaaagggagttccaatcggatatgcccaatggttgaaatgcttctaccaggctcttttctatattcttcgaataagcccc

SEQ ID NO: 17631 - DNA, 578 bp, Gossypium hirsutum
  Clone ID: LIB3831-001-Q1-N6-B3
aatccaatagccaaagaaaagggtttattaaaaaacttcaacactggaatatatatatatctttgttcatcatcacaaagtgaagaaacagagataatatattcattagttccatccaagatgtgctaatttttgttctaatgcatttcagcagcagcgccagcggcccttattttggcaataacaaacttaccaaactccgcaagcttgtcagtatcaggcataacatccttcacagcggcatgggaacagaacctgtccgcccattttaccagaccaggcgtcttcccctcgtccagcagcttcatcgcattgaacttctccgtcactctaagccatcccaagaagctcccaaaagctatatcaaggtacccaacttcatccccaccaaagtaacccttccctttgctgcacttgtcgtatgcttcttccatcaaagccaaccctgcttccacttgcgctattgctgctttctttgcttcctctcctttagcgactcctatacttttcaccgctgggaaccacttgtcgtcaagatatgcagcccaaaaccgagcgacagcacgttcacagggatc

SEQ ID NO: 17632 - DNA, 609 bp, Gossypium hirsutum
  Clone ID: LIB3831-001-Q1-N6-B4
aattaattctcctaactcttattaattcgtttataaacaattttctagtgtatactgtatacacgtacaaattcttttttcagaagaaagcaagaaaaacgccaaaaaaaaaaaagaaagagaactttttgcttggtaatctccctaaaactaaatgatttatataacaaaaatcattaaaaaaaaaggtgggtttaatttgtaattttactaaaagtcaatcaaattttatatcagacctggaacatccatgagctgaagaagaagaagaagatgatgatgatgaagaattgctgtttccatcaatgtcttcaacgttcttctttctcaaatgcattttgacgtagaaattaaggaacagtattaaaatgacgccgtttagaacggagttgaatccccaagctcccatgccgttacatccacctttgagaaaatggaggaaaaggacaccaaaatgggagattaggttacaggctaaaaggacgacttgacaattgacgacgaaagggaaacaggcactcggaagaccgatcgccgtccaaaaaggtagccgtatacgacggagtataagagagtggctaagagaatggcgaggacttggaatgattg

SEQ ID NO: 17633 - DNA, 601 bp, Gossypium hirsutum
  Clone ID: LIB3831-001-Q1-N6-B5
atgagataaaaatgtgtgcgtgccaaaattctttttgaaaaatcacgatgaacttaaagcacaaaaacaaaataagaacagaaaatagttaaaattcataacacaattttccaatttcttctttgggataaatggcttgatgtaaccatctttatctaattgacccattggtaatggaggaaactttgcaaatcccagcagatgtggtcaaaggaatatctttataacaggccaccagatttgcatcactgtggagatccacttgtagagtttcccaaacctttttctttgggtttaacacatcatccggctcgcctgtgaaaccaggaaaggtaactcgctctccgaccttggctgactttggtggttcaaccaattccaccttggtgtggtcgttgttcgaagctgcaagaaccattgcatgtgattttataccgcgcatggttgcgggcttcaaattacaaagaacacaaaccatccggtcctgcatctcttccaaaggaatatatttcacgagcccactaacaactgttcgaggctgcgcttcacccacatcgatctcttcaacatacagagaatcagcatcgggatgtttctgagc

SEQ ID NO: 17634 - DNA, 641 bp, Gossypium hirsutum
  Clone ID: LIB3831-001-Q1-N6-B6
agagaaaaaaacataaatatattaaacacacaaacccatacccgaaatcaaaatcctaactcatgaacaaaatatattaatccctgcattatttgcatagtagagatggtaaatttgggtaactagagatatcctctttccttgcagcactgaatggctccatcaaacatttcctccaccccattcttgaattcgaaacctgtttccaacagtttctttgatgacaaaccaggacatttcatacctttgatttctctcaaggattctgatgatggaattgggaactctgggtatttgccaccaagaaattcagacaacttctcaaggcttatggtgtcggaagaacaattgtatcttccttttgcatctggatattcaagcaggaatatatgtgcccttgccacgtcatcaacatgcaccattgaaaaattcagaaggaaactatattcagattggttccctaagaccagagccaatgatgtgcgcactgaaccagggaacttggggcatatgaaagggcctacaacaaaactaggaatcactgtcaccacatccaatccatgttgtgcaccaaattcaagagccgccctttctgtccatgtcttagaaaaatgtaagaatgtgcgtttgggcttaatttt

SEQ ID NO: 17635 - DNA, 595 bp, Gossypium hirsutum
  Clone ID: LIB3831-001-Q1-N6-B7
gcatgaatcatcataacttttaaatcattgaaattcatgcatcatacacagtcaacaccatccttacatacatatattacatccatccctacatccaccaagcccatgaccaacatcaagagaaggcaacctggcttatgctaaaagaaaaatgcaatggatcgatcgttacaaaccagtaccattgcaccattactcacctgcacattaacaaactcgtctcttggaaaagaaactgagtaaacaaacattttattcggccacactcggctttctctttggcgaggcattttagtgaagcttgtttgcaagattgcattgcttcctgatctcacccttgctaccagtgagaggattgttctcaaagaggagagtaatggcccttgagaactccttgaagaaatagtcttggctcttggccattttcttcacataagggctggtccttttgtcgtaccccagttggtgatccacaatcaacaaacccttgttgtccagtatgttcctgtagtagttgttatccaaaaccatgggtgtcccacggtcgtttctacatactggacggccttggggtctgggatctgatcagggcatt

SEQ ID NO: 17636 - DNA, 631 bp, Gossypium hirsutum
  Clone ID: LIB3831-001-Q1-N6-B8
ggatcgttgttcttctaaaacagagctggccatgttgtttattattaagccgctgatggggccgttacgtattggactgcaccagcttctgagagtgccaccaggaacggctgcatgttcaccggctctgccgcctgtccttcaccaatggttggtttttcgtaatcaagagactcgtcgttgtaaatatcccaccatttctgaaccaacatcttcacgtcttctctttgcatgttctcttctttccctgtgtacctccatggcttcgatcccgctgcacagtagtgaacaaccttcactttgtcaagctccacgttgtcgggatgacgccataacatggcgagaaccaggttgtagaccaaaggaattggtttgtaaatgtccttaaagtacatgttcaaaaagtcctgctcggcaaatggggtaggaggggtgcttttaagagtagccaagaggttttcataggtggtaagactgggctcaaacacaaacatgccagcattgaagtaaagtgcaggtggctgacccatctcggcgggccacttgaccttgtcagggcactgttggcagtaaccgatcttgaattgtggggtatgactccacgttttctcacaaaacagtccattactgc

SEQ ID NO: 17637 - DNA, 626 bp, Gossypium hirsutum
  Clone ID: LIB3831-001-Q1-N6-B9
gaataattgtttcttttataaataagataataaaagccagcacaataatttgagttctagcaaaacaaaaaacaataaccaacacaataaattaaagttctagcagaacaagaaaacatgaaaatcttaaatttgaaggactcctcaagaaactactattgcagcatcccaaaatagtttatattttgttaaatgcaacaatatcacagctctgaacgtattcattaattggttccactgtaagatgttcctcaatcagagtatcaaccgacactaaatcatccacaattgtcatcataatttgcaatttcttgattccgtaaccaacaggcacaagcttagaagctccccaaagtagtccttccatttgaacacttcttactgcttcttcaagctttttcatgtctgtctcatcgtcccatggcttaatatccaataataccgaggactttccggattctttcttcttggaagaggccttaactgcagctgcacgttcttcagctgccttcttttcctcctcagtctcttcaccaaacaagtctacatcatcatcgtcgtcatcttcagcagctgcagcctttgaatctgcagttggaggagtggccacagcctcagcgggagca

SEQ ID NO: 17638 - DNA, 512 bp, Gossypium hirsutum
  Clone ID: LIB3831-001-Q1-N6-C1
caaaaagagttgacttaagtttttctaactcttatacaaagagtcgccataacatgtgtcaacaagtctattccaacgcttaataaaatgtccacccaaaagtttcggcttaatgtttaagcgtagccttatgcatacctatctcaacactgaaattaaattattcattatatctatttcaaggggaactcatctccgatgtcagctcaacctccaatgtctgcaatttctggaagtctttgattcttcttttcagctttttcgttagcttcttccttctcatcttcaaacgctctaagcttgccacactctttgcagcatttattttggtagccatcaaagattcaaccgtcactcttttctcctctatcttattggctaatccagttttcatcatcttaaactgaaaaatttcttttgctttcaaaatgctggatttgtacagcttttctcgaacagccaacctagtatttccccgttttccttcaggaatgggtgctacatcatcccct

SEQ ID NO: 17639 - DNA, 607 bp, Gossypium hirsutum
  Clone ID: LIB3831-001-Q1-N6-C10
gcttaacacttttgttgattctatggctctgcaagtttccgaccaccaattcgagctgatacatatcgtccttccccttttatcttccgctcgaatcaacgaattaaatcaattacattgtcttagagaccaaaagaaacactttgaaacaagattttaacaacacattagtgttacatgagaacatacatcccacaagctaagacgacaaacaccgaaaaaaaaatctctaattgccgatgaatgtttaaacctgattggttgtcttaccgtttcaatatgatacattgtttgatttcttcgaatcccaaggtgggaagcagcctcttaagggtgattgtaggagtaatgaggacttttgccgcatggaaactgaagataggcaactaaatgcgcatctcagcctccttttctcactatagaaaggttgataattcggatcgtgccgcacgaccgaagtcttaagggcttcgggaagaatgcaactgcacattgaacctattcttgcaagccgatttacccatttcgggatgtgtttccctgtcaacctgtgacaaatatccttacagaaatggttgcagttcttgatgatcaagtgatatgtatc

SEQ ID NO: 17640 - DNA, 605 bp, Gossypium hirsutum
  Clone ID: LIB3831-001-Q1-N6-C11
attatgatcacatttaagatttttatgaattttgaaatgctggtatgttttggttgttgaaacattcaacccatgatgacaagaatagaaccaaaaaggttagaccacatgaatacttttaaataacatcattattaaaaaataaccatcatttgagctaccctacatccatattaatggaaaagagccaagccagctgctaaacttgacccacccaaaaatggcgtacaataaaagcaggttaatgtcaacttgtagggttgaccataagtgctccagttttgtcttcaatagctgtcaccagatcagagggtgaaaatgattcatgcttaaactactcgaggatccttaatcagtcattcttcagataaaaggcaaaattgcagactgccgccccaatttcattcatctggtaaggcaaaaccacaaaaagtcgtcccgatttcacggtggtgggaatccattggccctcaaatacaagcagctcgagatcatgagcaaacatgttggcacggaacatgttggcacggggaaatgatcagtttgatgaaaatgtcaaaaccattaaccccgccgacattgaagctgcaggctgcggctcatta

SEQ ID NO: 17641 - DNA, 82 bp, Gossypium hirsutum
  Clone ID: LIB3831-001-Q1-N6-C12
aaagcaaagaagcaaatggttgattcaagcggaaacaggtggcttttacatatagtttcagcgagtactactcggttttttt

SEQ ID NO: 17642 - DNA, 504 bp, Gossypium hirsutum
  Clone ID: LIB3831-001-Q1-N6-C2
atgtaagagactaatttggcaaatgttatgtttctacaatcaaattattgaaagaataacgaataaatcaatatcatgattccagtgtgacatatattcgtgtgcctgtagaactagcctgatttgccccagaattattcatcatcttctctgcttacctaagttgctggtttcggtcctctaacaaaaactgaaatcgctactgtataattcaagtgagaaatcggaaaccacaagatttcacagcctagtaggtgattgctgcaagtctctttaccaggggaaagcaccagaatcaaagaatgtaaaatgcagtgtataattcaactgacacgattgactaccttaaataccgtctttgaactgaactcaaggtccgctcaagcttcaggctgctagtttgcttttcctgggatcttttgcagatgcatccaggaagaggatttgcataaaaattctccttcagtcgtggtgactcccccggctgtctttagtacggcgctc

SEQ ID NO: 17643 - DNA, 592 bp, Gossypium hirsutum
  Clone ID: LIB3831-001-Q1-N6-C3
aatagaaatttatttcattaacaaagcaagcttttacaagataatttattctctcagcatataatataaaactccatataaagaactcttttctcttttttttttttttgagagagagagagttctatataggcactcttgataaccgggaaaggtagcttaagtaggcacataatataacacatagtaggacaaaacattagagttttgatccttggatgggcaaatatacagcagcaacatttccttaagcatccaaatgaatcatgcatctcagacctataccctggagcatgtagtcgaatgccttgttaatatcggcaaaaggcacagagtgtgtgatgaacttgtccatatccagccccagctccttgttcaaatatttgtcgacaaccatgggaatatcagtgcgtggtttatagttgccataaaaagcacccttaagggtcctctcacttagtagattcattggatgagttttgaatgcatcgtctttctttggcacacccaccagcacacaaacaccccaaccatcatggacgcattcaaaagcggaaatcatggcttggacgctccctgtacactccacact

SEQ ID NO: 17644 - DNA, 460 bp, Gossypium hirsutum
  Clone ID: LIB3831-001-Q1-N6-C4
attgaaatatgggcgcaattccctggactttttttagtcttttaaagacctacaaacaacataagggggatcattcaaaactttaaaaaggcctgctacaaagacaaagaacatagttatcgacttcaattatctatcagggtctactctatccccgggttatcaaaatcttataccgatcaaagttttcccccattgcccgggttctcatcggattcataaaaatcatcatcggcggcggaataaaaggcctcttcatatatattgccccgaaagagtttgctaaactccaattccccatcattttcattaaggaattccagcccatatttcgagtcacgatgcttaactaaaagccaacccaacagtctgtcttccttgttaaagtactgcagctccttgttgatattggggggggccatcattggcatctgcatgagttgaccctgggagtatcttc

SEQ ID NO: 17645 - DNA, 121 bp, Gossypium hirsutum
  Clone ID: LIB3831-001-Q1-N6-C5
aaaaactggggccaaaaaacattggggggggaaaaaaatagggaaattgggaaaaagcccaaatttaaaaatttttttttgggaaaaaaaaatccccccccccctggggggcggggggggg

SEQ ID NO: 17646 - DNA, 471 bp, Gossypium hirsutum
  Clone ID: LIB3831-001-Q1-N6-C6
agaggggcaataaagcaaccaatttattcattattggttcaatcatggggaggattcaaacctcaattggacataagggcaaaaaaagaaaactccaaatccctaaataaaacgaaaacaagctgaaaaaataacctatctgacacttttgcagctaaaaaacattcaactctccttgaaaataagttttaccaatgttgcggaaaaaaagtatggcactttttacttgggaagtccagtttctgggtcaaaaaaagccagtttgtcatttgaaaacaaaatagggcctttcccaagtcttgtacaaatgaaataactgacatccccagggtatttctgagctgaaccattttcaggagggggggacaaaacttccacatccttcaatccctcgagtccaacatttttaaatatcgtcttatcacccaaaaggtagctgtccaaatcagtatcaaactttggagggaagta

SEQ ID NO: 17647 - DNA, 588 bp, Gossypium hirsutum
  Clone ID: LIB3831-001-Q1-N6-C7
gaaatgcaatgccaaaattgtagttatatatatatgaaaaggtttgttccttttggccctaaggcagtagtaaccctcctctttgactctgaccctctccatttacatgtttacgattgttatacatacagaagcaccagagtatgtgctctcaagcccatcataggaccccccatggatatagcatagtaagtcagagttccattgttgccctcagaacccctctctgttcttcagatattgacatcccagatcaatataattgagtctaactttcgactgtctagatcttcagagttcatgcaaatctcagcactgctatagccatcaatgtcgcggctctgaaatatatctgattaacacttttctccactctctcaaccatctcctcttccttcagaccagacttgctagtatttttgctgatttgtacaaccgtgtctctcaattggttaactgcccatgagatccaaactagcccaaaaccgatgctggcgctaaagagtttaggtgtacaaaatggaactctccaacaagctaccttccaaataacagataaaagaacagcaagaccggtcccagcaatgc

SEQ ID NO: 17648 - DNA, 297 bp, Gossypium hirsutum
  Clone ID: LIB3831-001-Q1-N6-C8
aaaaaaaaaagtttttaaacttaaaaaaaaagaaaggggggggggggggatccgggggaattaaaaggggtttaaaaaaaaaatttggggggggggggttttgggaaaaaaaaaaagactgggggaaagccaaaaaaacccaaccttttatattccttttgggaaaaggaaaaaaacctttaccaggttaataatttttggaaaggaaaacaaacctttaattaaacttacccaaacgctcctttgaaaaaaaattttttttttttggccccccccgaaaaaactaaaaattggggg

SEQ ID NO: 17649 - DNA, 588 bp, Gossypium hirsutum
  Clone ID: LIB3831-001-Q1-N6-C9
gatataaagtaggaaccttttatggcccaaaatatcctcatttatttccacactttccaatggggcaagaacattacaaaacatctaccactataaatagttcatctctacaaaagttcacttcaatactcggaactcatcatcatattattaagaggaactaaaaggaacccatggtcttccagaaattgaagctaggcaaaccaacagtaaacttattcccatatctaaattcaaaagacttcagaaacttactcaactgaaaactcaaacaacatagtgtgctggtacttgctaccaggttgaacaacgactgatgggaagtttgattggtttatggcatttggaaatccctgcgtttccaagcataaccctgcatgcttattataaacagcacctcctttcccgactactccattcacgtaattaccagtgtaaaattgcatcccaggtgcattggtccataagttaaggaccctcgagctggatgggtccttcaatttggcagcacgtttcaaacccaatttttcttccccaccgccaagaacatagttatggtcataacccaaacctacctcatggacttga

SEQ ID NO: 17650 - DNA, 616 bp, Gossypium hirsutum
  Clone ID: LIB3831-001-Q1-N6-D1
cgaaaaaaaaaaacttattattaagtcaaaatacaatacaatgattttatcttataataaataataatagtaattatcaccaagagagaatgctgcatatgtatgactgtaggtgagaagaatcttccaactatagtagaggtttttggctaaaataattagggcataggttatttttaactaaagtcatgttgataggggattgatatatgaaacaaaagggatcaatggagaaggacaacctagaagtggaccatcgttgctcgaaaccgagtagcgagtttgactagctcttcttgactcaacatcctgtcaccataagggtcatcttcctgtcttggctcgtttcattccagtaccgttaaagggtgacatactagggctcatagtcgggctcattctcggactctcttcccttaatgtaccatttagtaaagccaactccctaagctgttgtttcttatagttatccaaggattcatccacaggtttcagaagattttctagtatggcaacagcgtagtccaaacgagaatttatcacatcttcgggaagttcagcctccaccaacacatgcaacggctcattaaggtgttcgaatccaggtttatctttt

SEQ ID NO: 17651 - DNA, 475 bp, Gossypium hirsutum
  Clone ID: LIB3831-001-Q1-N6-D10
agaaaaataaaaaacctgggtttcacccttattttagtatatcaaactagattgggggaaagcccaattttaggggggggaacagggttcgaaattttgggttttaaaacctaaaaacaagacataataaaagtaagggaaagcccgggactaggaccagagcccccagtccaaagtaatttttaactacaaaaatttgactttcattattaaacaaatatattctggttttaaacaacaccaacactgtttcccaaaagttagaaaaaaaaaaccccacactttttaaaaacattggtcacgggcgacccccacccttgaatttggcacatcgaaaaccaccctatgggtctgctggtgcatattggcgaacacattcagggctggggccggggccatcgccaaacatgtgaagctgcctgctgggctggggagcaataggttcttttggggcaatgtcacgttcatgccccaa

SEQ ID NO: 17652 - DNA, 557 bp, Gossypium hirsutum
  Clone ID: LIB3831-001-Q1-N6-D12
gagaggaatatgtaataaaataaaacaagatcatgcatcaatagtcgccaacataagaaactaaaagtaatggacaatccaatccatccttagccaatgaggttttcgttattttcgcctaattgactcacgttcggatgtttggttttctagtctcggcttgaacttctgatgtaaactctctactgcaaagttacatgaatggagcaatttgccatcagctgataatcatcttcttaaaaaattcagcttcctcaggaaaatactccaagagttcatctttggtcacccaaacgaaatcctcgcacttccggatattgaacttgttggtatcaatcacttgtgacttgaaaaaaaatcgcttaaatggttcaggcacattctccatctgctgtataaccatgtgccccatgggagcatttccgacaaagtaagtgtgagagaggtctccgagtacagaggctaaggcagactctgcacacttgcgcaacgtctcctctgaacataaactttttctggaaaatgcccacgggtttcctgctaggagctgcattact

SEQ ID NO: 17653 - DNA, 585 bp, Gossypium hirsutum
  Clone ID: LIB3831-001-Q1-N6-D2
cccattctacaagtactgggactcagttattcacatggagactgatccatatgctatgcatttgcagctcctatattcccatggatccatagatttagaaggagaaagcaaaggactactctgtggcagcaacaactgttggcccttccaccttgaatttagcaccccatatctcctcttcttcagcaggcactgcagtgatcttgttcttaggattctcatagcttcttaatcctcctactgctgtggagtagaaacagccttgaggaaaagaagcaagagatttgccacaggcacctttcagcaattcagcattatcagcaaaggccacatatccgtcggcggtgattccccaatagagaggaaccttaccaaattgatcagaagccacaaacaaagtggaggtggatttgtcaaagacaatgaaagcaaagctcccaattagatggccaaccacatggtttggaggataaggtgctcggtcacgaagggccttgtaagcttcaatgaccaaaatcacttcatttgccgactttgccagaccatattgctgctttaaactccccaattatcaagggctccctc

SEQ ID NO: 17654 - DNA, 636 bp, Gossypium hirsutum
  Clone ID: LIB3831-001-Q1-N6-D3
gacaaaatagaaaagaaaactcatatttcatcacgcacaattacctcaaaaataccaaagcgttggaagcactggtttgtcgtttgtatattctacgatttcacattattgagacaccaaatttacacaccaatattacattcgccgtaagttacaggtcgaaatgtgatacgtctgcatcgggactaaagctctgcaagtttgatgactgcagggatgcttcactaaaatatctggacaatatgagccttgctacattctcagctgcaaccgcactcgtctccatggtgctggccgcattctcaaatgcgtttacataatacaaatgttgaccatccaaaatgaatggtgcaaacagttccggagctttataatgcggataggctccccagtttattctgtttgtctgcagccttgcactaaaaatgctatccagtaatgcatctgacattggttctcgagaaaatattttgtaagttgtatcattttcatcaagttgcttgagaactgaaatgcatgtgaatggaaggtcaggatcctctaatgtgccaaccagttctggaatctcagcaacagtgcgcagaccaaaataggctggattcaagaggcctctcacaaaggtgcatgtgtatgctg

SEQ ID NO: 17655 - DNA, 635 bp, Gossypium hirsutum
  Clone ID: LIB3831-001-Q1-N6-D4
aaagaaacgatagaacaattgcacttttgcgatcaaacaatttacacgcaatatgtgcttcatgaaggccttataacatcacagcatatattttatttatggggaaaaaaagaattttgaagcaatgcaacaataagaaaaagaaaagctacaagtggatggacctcatctatcacacaaacaatcacagttggtgaagtccaccttcaattcaccttatctaacatgaatatcatcgtttgtgaatgaactgaacggcccttgcatccgcatctgtatctctttgatacaaatttacgatttatcacctattatcttttatcgtggttaacctggttaatgccaatatggctcaactgtacattctcattccaggagggatccgctggaggtagctgatattcatcaggtttcaatgctagagcaaaatctggcaaagttggagccgtctccatgattttttcataagagtagagatcacggtttatccgcaccttgctagaagtgtctttcggaattttctcggatagatacttcatggttccccaaagaggtgggtttctggataaaggatgagctgcattaaatacctcacaagcccttttactttctttgaaaattcatcagcagcttga

SEQ ID NO: 17656 - DNA, 617 bp, Gossypium hirsutum
  Clone ID: LIB3831-001-Q1-N6-D5
atgaagagattgattttatcaaacaatgcatggatcttacaaattaatacccaacaaagctaaatgcaagttcatattttcgaaagacttgttaaatcaaaacacccttggctttgcaacaatggttgaatgcttcagaatatgcagactgaactgtccacctttctccgatgtatcaagcttagactgcccctttggaggcaatagctcaaaattctgcaccaaacgtcccaatgtgatccctaggattggcagtgccaaaataatccctggacagctcctccttccaacaccaaatggaagatacctgaagtcattcccattggcttctaccttcgattcctcctcaaaaaacctttcgggccggaactcttctgggttcttccagtgagccgggttattggctaaccaccatgcattcacaaggatcttactctctgcagggatgtcatacccaccaagctttgcatcatggaggttcatgtgtgggactagtagagggatggccattcggagcctgagagtctccttgatcactgcctgcagatatggaagcttatgggtgtcgggttcggtaacctgcacgccgggtcctagtacggtgtcgatttcgttgc

SEQ ID NO: 17657 - DNA, 587 bp, Gossypium hirsutum
  Clone ID: LIB3831-001-Q1-N6-D6
aacttggaacttcattccaaagaagaaatgtccggacactgcctcggacagcagaggtcctcaattacattgaatcaaccaaaaaattactaaaaccataaggaatcaaacagaaaaacaaccaataaagttactaaacacagttttatggactgcaaactgttgacttctatcttcactaaacaaagagttttattgaccgagtgaaagttgttcacttatatttttattacaagatagcacaaaagtcatactggtgcacacatcatcgaatctgtacttagtggtaccattatagcaataaagatgaaaacaaggaaagagaaaaaaaagaacaatgaaacgagttccaatgccagtgttgcacattatctgtcgaggttagaattaccttttgatcttgaagaggtgtgcctttcaccgcaaccaaggcattaatgggaacactctctgggtgagtggggagtgtagccaatgtgtgcaataaaccaacccggtcctctactgcttctccaagccctataatgccccctgaacagacattaattcctgcttcacggacatgttgaagggtttccaaccgctca

SEQ ID NO: 17658 - DNA, 612 bp, Gossypium hirsutum
  Clone ID: LIB3831-001-Q1-N6-D7
attcccttccatcattccctaagtcccataggtttgatcctatagaatctgacccattttctcattgagcgaggggtacgaaataaatcagattgatttttcgatcaaaagcactatgtgaaatcttcggtttttcctctttctctatccctatcccataggtacagcatttgaatcaatagagaaccttttcctcctatatgaatcaatattattacattccaattccttactgataccccccaaggaaaatcccgaattggatccaaaattgacgggttagtgtgagcttatccatgcggttatgcactcttcgaataggaatccattttctgaaagatcctggctttcgtgctttggtgagtctccgagatcctttcgacgacctatgttgtgttgaagggatatctatatgatccgatcgattgcgtaaagcctgcggtagcaacggaaccggggaaagtatacagaaaagacagttctttctattatattagtattttctattctattttttctattctattagtattagagtattagattagtattctattagtattagattagtattagttagattagattagtattagttagtgatcccggctc

SEQ ID NO: 17659 - DNA, 637 bp, Gossypium hirsutum
  unsure (1)..(637): unsure at all n locations; Clone ID: LIB3831-001-Q1-N6-D8
ctgcttaagctttttttttccttgtcaactctttctcattaataaaaacaaagaaaaataaaaacagataaaaatgacaaaaagaaaagaaaaaaacttataaagactaatgagcagtcacattctgcccgtagcgaaatggtttttaacactgtaaaaggtgcttttacctattcctacattctaaggaataagctataagaccagtcccaatacctgataccaatttatctaacttcttcataacaaacccgaagtacaaccctgttccaaatctaccaatccaatttagcaagcactggctgcacacaccggtttcacggggccatcttcggttacaacaactgatccattctcttctatatgtttaacatctccattcgccttcgctacctccgccgtcgatgcagacgttgatttttccgaagcctcctttgctatggctgcattttgtttgctatcagttacagcatcatcattaggctccccattcgaaacctgtttctgtaaaagccgatgcttagcctttttctcttggattatcttttgacgagtctcgtagaattcaaaatcatcaagaatgcaggtcttacttgaatgatccttaaagatntgagaatntgaatcccttgctcaa

SEQ ID NO: 17660 - DNA, 646 bp, Gossypium hirsutum
  Clone ID: LIB3831-001-Q1-N6-D9
actagaataggggataccttcaaaattccagttgtcataacaagacaaatccaaacataacaagtaataggaaaggaaaaacaaaaacataaaaacatctaatagtcccaggttcttcatatctagaggcagttcagggattttaatgtcttctccttatgttcctacaacccgaactatgattgaaaacagttacaccttacattccagtaaaagctttcttccctccaccagaagatccagcaggaatcactttcaaaacattgaacctcacagtctttgacaacggcctgcattgcccgataatgacatgatctccttccttcacacggaagcatggagaaatatgtgcagggatatttgaatgtctcttctcgtacctttggtatttcttgatataatgtaggtaattccgtcgaacaatgattgtccttatcatcttggcactatggcaagtaccggctaaaatgcgacccctgatggaaacagtgccggtgaatgggcatttcttgtcgatgtaggttccttcagtagcttcacgaggggttttgaagcccaaaccaatgctcttccagaagcggtttcctccctttcctggtctcttccctttcccagatttcttggagcttaaaaacactttgggtgc

SEQ ID NO: 17661 - DNA, 587 bp, Gossypium hirsutum
  unsure (1)..(587): unsure at all n locations; Clone ID: LIB3831-001-Q1-N6-E1
aggagccaaatcaagaaacccattaacaattgaaacaatgttcctaggctttaaacacccatatgcattctatatttcgtgcttcatcctctctactcctaaaaccaattgttttctttcactaccagggaacaaaaatgataggaaattcaatccccccccccaaatcaacggtccacaaaaaacccaattctcgtacctggttcaaaccctgcctttttatttgctgtctgtgaaatctgcttcaattacgtccccatcaggccccttgtttgatgaatctgaaggtccagtttcaccaccaggtgcaggtccaccaggacctcctgctgcaccgggttggttgtagagtgactggccaagctgcatcacttcttggttgagggcagccatggcatccttcataccttgtgttgagccccctgaaattgcatccctgagctcctgcaattttgcctctactttctctttcactggacctggaaccttgtctccgagctctttcagctgcttctcagtctggtagacaacagaatcagcctggttctttgngtctatagcatctcttctctccttatcctcctttc

SEQ ID NO: 17662 - DNA, 621 bp, Gossypium hirsutum
  Clone ID: LIB3831-001-Q1-N6-E10
aaacaaatgcactatgatttattattattacttgtaaaagacaacatgcaaactgcctcttctaataaaaacatacaagcagaaacactaaatttaagcgacctgcttgggagttgggacccaggaaccacccattacagagaacagattgaccatgaaaaatgtccccccccccccaattcctgcttgaaccttctctaaactctctccctgccatatgccaattgcatgttagtttagccaataggcaagctatcattggtgggtcatttccatgccccagtcccaagcctcatccaccttaatactatcacgtccttattcaactagaatagaaactaattgatttcaacatgcaaacttagctaacagtaagcgcactacacaagcttccattgactccccatcttacaagcttattttactcggtagtagtcttctcagcttgagcttcagctggttcctcttcttcctttgcagcttcctctttgggtgcttccactggggcggcttcggcttcggcttctgcttttacttcttcttctgctgctgcagctactgctgcttctgtagactctgtgctttctttggtttcttcaacggtggctcagtagtctcctt

SEQ ID NO: 17663 - DNA, 608 bp, Gossypium hirsutum
  Clone ID: LIB3831-001-Q1-N6-E11
acttcacaatcacctacaactactataagttccactcaacattagaaatacagcttctcaccatgtcaaatgcaagaagcacacaacaattataataattaacacacaggcattgctaccattaaaatggttggtcattacaagcaaaaataccatttagaaagaaacttagctcggttggtagtcgtcatctcagtagttacaatctccagagtagtcatcgtctatcagtagtaagcctgctgatatgcaggtgctataccattaccataccctccatatgcaggatagttcatgggagctccagggtaagaaccagctagctgaggggctgcttctggtgagtacatatacggacaggtgggtggggtttgggttccgtacatggcaggtgggggggatgggtatgctgggactgcagcagggtactgagggtgtgagggagacctgacaattgacggtggtgctgcaaaagatgagacgtatgcattcgttgaacggccagctttagctggaggcattggaccgccattactggcccgtgttcgcttgttagcaggaactgcagctggctttctcttctcagtcttggtcttctctagctgctc

SEQ ID NO: 17664 - DNA, 625 bp, Gossypium hirsutum
  Clone ID: LIB3831-001-Q1-N6-E12
acaaaaataaacaaattattgctaataagttaaaaaaaaatcccggataaaaccaacagatgtaatgtttatttgtaatatacacattaaagttacacatttcacaccaatgattaacttaagcaattgacaaacaggaaatgaccctagagacttagcagaaaactgggattcaatacttcttgttggagtgaaaaagaaggaattaataaaaaaaagaacaaatacattctttaattttacctggaaaacgaaaaaacatcatcacatgacgatttccggcttcaagatgctcgatttgatctctttgtgaggcaaaaccacgccgccgttgctgtaaatttcgtcacatacgtgaacgtcttctccaaggatggtcatgttttctactctagcccattgaccaatggtggaatgccatccgatgatactgctggatatgcatgcgtgtttcttgatgcgcactccacgcatcaccgtgcaacgagaaagtctgactccggactcgacaacgcagcctggaccaattgccacgtctggtccgatcaaacatccttctccgattttggcagtctcatgaaccaaaacgttttctacaatgtttggaccactggccaacttaggt

SEQ ID NO: 17665 - DNA, 271 bp, Gossypium hirsutum
  Clone ID: LIB3831-001-Q1-N6-E2
atacaactgatatgcttacttattcaatgggaaaacaatacatttataatcaaaatacatcaccaaattttcaactaatcccactaatcagcattgggactagtaaaacattgcttggccatttgaataagctgacttattagcttaatcatcacctaaacacttcgttttcaaccaaactaaattacattgcaactaaaacaaaaaatatgttgctacaacatgcacaattgctgcagcatgcatccaagctgtttgaactcaacaaaat

SEQ ID NO: 17666 - DNA, 614 bp, Gossypium hirsutum
  Clone ID: LIB3831-001-Q1-N6-E3
caaaaagaaacaatcccaatcattgtataaataaaaataatttaagatataagccatcaatttctagtgccaaatacataagaagccataaagccatccattttttattgttctaaactcggtaataatatgataaaataacaatgtgcccatcctcctccaacctgcaaaataagcactccaagcaatggagctttggcaagtgtcggtgatccccaaacaagcctggggctgctaaacaatatgttagctgcttactgaacaagcctacttcgaagcaccattggacagctcggcggattttgcaccagatggattcagctcatcccatgcttcgatccaggtcaccatagcatcagccagcttgttgaagtagtcatctaccttgcctagttttgccttgacctgcttggagatttcgatgtagcatttctgaaccgaggtgcagtccttaggaagggtaacagactggaagaacgggatcaactcttcttgccagtaaattcctttgtattctttcctaagattcacaaacgggttgctcgctttgctgtgccaaatgtaaggcaatcctgtcttcactcccagtccgaggtgatcacatatgaccttgg

SEQ ID NO: 17667 - DNA, 581 bp, Gossypium hirsutum
  Clone ID: LIB3831-001-Q1-N6-E4
aaaagataaaatacccaaacgccatgcatcctaaccaggagcaatttatttataatagaaaacaaaaacataaaaccataaaagagattttcaactactcttcttcctcttcttcctctttccagcagcatttcagagttgatcttggtgatccacagccaccagtgctcttaaatttctggtacatcatggaacctccacttgcaagcccttcaatgcccatctctccgcaacagtattcttttacgtccagcaggcagctctgctcaagtgactgaccaccaccaacatcaacgtgaactgctacagaaaagtcactcggtttgaagcatttcaacaccctcccgaccaactgcttcagattcttatctttcagattatatcccacagcttcaaagcttgcatagctaaatccatcttctggggtaacatgaatagtagaaattgcagcaccttcaatcgcattcatcgagtaaccacagggtccaaactcaaaatcacatatctcagactctggaaggatcttccttatgccagaattaatggtcatcacagctgcggagcctgattggtctttgtag

SEQ ID NO: 17668 - DNA, 496 bp, Gossypium hirsutum
  Clone ID: LIB3831-001-Q1-N6-E5
aaattaagataaaaaccaataaaagtccatcatcaatgtccttttacaaaatttcaggctcaaataaagaacctatactagccaaatacaattctaacccaaagtcataaacccatatcctaaacctagcccaaatacagaacccaaaaggggaatctcaacagccgagagcactagaagcttctggaacgtgccagaatagtaccaaggggtccggctcccatgaacgatttccccgcacggcctctttcacgcacacctttcctcactcctccgtacggctgttcagtgcgagcaggccatggatttcttctcctttcttctctgaaatcgaagttgaggagggatttcgggctgagatttctccgggctcgacgagcaccatccggtgaagatgaataggtgattaggaagggggaatctaacggtgccatccatcaattgtgatgttgaaagcgtcggctgaatgggagcaaatccttagggtttgtttccc

SEQ ID NO: 17669 - DNA, 639 bp, Gossypium hirsutum
  Clone ID: LIB3831-001-Q1-N6-E6
gggaatgaagcagtcagctgattagactatttaaatcagaaatccatatcacatttttaagttgactgaacagtgataagaatctatgtaaagtttgccacaagcaatttcaaaagttttaacacaatggtcaaatcttcgattgcaattttagcaggcctgcattagggtataattcctttctccttcataaagtacacagcaattgcaagtagcaccattaatatgatcatccatgtcattccaccactactcgtcttgtccttgattggggtcaacctagcacttgagtccagtgatgcagaaaccaaagcccttgaatcaggggagaacgtcaatgctgtaaccaaaccaaggtgagcttttttaaccatcatctgaacccgcatattggcagaatctatgataaaaaggtctcctccgactgttccaactgcaaggaacttcccatcagacgagacattgaacgcagagatagcttcccggactactcggcttgagcgaattcttttccatgtggttgtgttatatgttaaaatacttccaccatagtctgtgactgcagcaatatacagatgtggattcttatcattaatttgagaaaatctgcagaaggcaaaacctcatcatttccctttg

SEQ ID NO: 17670 - DNA, 635 bp, Gossypium hirsutum
  Clone ID: LIB3831-001-Q1-N6-E7
aactgttgaaaagggaaatttgatcagataatgcagaccatgaccatgggaaaacagaaaacaaaaaagtccatatcagacatatagcgcgaaaacaccgttccatcttcttttcctgacatctacttgtactatctatctacttattttcattgcaagcagaagcggttcaagtcactgtgacctcaagattcatgtcgcgaggagcttctgaatgtccttctcaatttggaaaggcgatgtcgttggtggatacctctcaacaactttgccatttttatccaccaagaacttctcaaagttccacttgatcaggtcaccgaaaaaaccaccagcactcgacttcagaaactggtaaacgggagccgtatttggtccattcacatcaaccttatcaaatataggaaactctgccttgaacctggtacaagcaaattttttaatatcaggatttgatccaggctcttgtcccccgaattgattgcaagggaaagctagaatctcaaatccttgattcttgtacttgtcatatatgtgggaaagctcagagtaatttgatgttgtcaaaccacatcttgaagcacattaacaatcaaaagacttttcccttaaattgccaagagggtatccttccc

SEQ ID NO: 17671 - DNA, 535 bp, Gossypium hirsutum
  Clone ID: LIB3831-001-Q1-N6-E8
gacaaacgccacacggttttgccttcatttgtagagcatgaagttattcgaatattatcacaatagcacaacagtcaaacaccataatcattggggaagcgtcaaagcgcttcacttgggcagccccttaaacttcaaatattccacggtttggtcgtagatttcctcgatcccatacttaaagctgaatccttcgctaataagcttctctgaggaaatgatcaacttgggtttggaggggaaatctccaaaatcggtagggactttgaagtcagggtatcttttgttgaggaactttgctagttctggcacactggtattgacagcactgcatatatatcgacccgatgcaaattctttttcagccagaaaaacatgggctcggcattcgtcttccacatgtgtgatagagatcgaacctgacagcatctgcattcctttcaaagcatttatgaggaattcattgcctgaaatcaaagatgtagcaaggcctatgctgctggggacaattggggtaagggaaggaccagtcatg

SEQ ID NO: 17672 - DNA, 592 bp, Gossypium hirsutum
  Clone ID: LIB3831-001-Q1-N6-F1
aatccgagaatagatgattcctaatttcgaaatttctcataaaatattacaatacaatgtgcacgacatgtcttatttatccgtgaaactggtaaaaaactaaaaacgaatcacgcaacatttttgagatttcttctctcctatgtggaccttgaatacaacttagaaatgaaggtgatctaccatttagccttaccttacaaacaataatctaagaaccaaaccaccataccccataaaaatgcagacacaaacaaggactcctgtaacaacaatgctcgaggagattgcacctgctgctcgtaatgttctctcacttagtgtagagaacatcttcccatgggtgacgatatagtggctgcttcagtctcttctgatcgaaagtgtgcccaatcaaaccaatggatcgtgctagcacaaagagcccatttaggtagccaatctcaacaatctcatcaatctcttgctttgtgaacattccactaccagcaagaagatccaagaaaagtgacccgatggcaccatccacgttgaggacaaggttgttagcctttgagagatgtaggtttcaacttgaacggcatattccatg

SEQ ID NO: 17673 - DNA, 611 bp, Gossypium hirsutum
  Clone ID: LIB3831-001-Q1-N6-F10
aagaaattatagattttcttcattaaagaaaacttcaaatttaaaataatgtacataaaggatctcaacatgctagcactagattatgaaagcctgggttacaaattttcttggattttccctttcctgcataaaagggaaaattttcaattttctcaactctccaaatgcattgaaaaaaaaaagatgggtaattttttttggtaaatgagttaagctttgtctagttgttgaagcatttgggaaccggtaagagttggagtcgggatcggagggagagacggttttccgatacgaggctccaccgttatgtggttgtcgcgggtgagcgtgtgttgccttttacgcaccgctcttaccagtggctccatcattgctgccaccccaattccgttcaccgtttgtggttgttctgatctcttacgcgaactctctccgactaccatttcttcatgcccttttccatcattgatggacgaagcagctgacattgggcatttaacaggccgatcttcatcttgtggttccataggatgttcaacgggccagaaatcaacgtcgaactccaccgcatgcggctgccggcgaaagtccaagtccataccaccgtc

SEQ ID NO: 17674 - DNA, 601 bp, Gossypium hirsutum
  unsure (1)..(601): unsure at all n locations; Clone ID: LIB3831-001-Q1-N6-F11
gaaagcaaagttgcatctttttttgattaattaattgaaaaccagatgcagcaaaactggactgcaccaatggcaaaatatcatctcccacacaatccccatcaccttattcaaaccccatttggtcttcttcaagcagagacctcatttctcttccaccaaaacttaccatccaccccacacacaaactcctaccaaaatcaaaatctaaccatctaaccacaaatcatcaataaattttagtaaaaacaaaccatcccgttgtatggttcctttttctagtccaactctctccctctctctctctcactctctctccctctctcgtattctctcctcagtacctgtagtgagggggcttgtaaggaccctcaatggggacgctaatgtagtcagcttgatccttggtgagcttggtgaggttagccccaagctttccaaggtgaagagcagccaccttctcatcaaggtgcttaggcaaaacgtacaccttcttctcgtacttgcctgttgccttctccttccacagctccagctgggcgatcacctggttagtgaacgagcatgacatgacanagctagggtggccagtagcacaacc

SEQ ID NO: 17675 - DNA, 605 bp, Gossypium hirsutum
  Clone ID: LIB3831-001-Q1-N6-F12
aagaaacaaaatgcatcttattgttatacaagaaaagtcaagtaaaatcaaaatacatgtacttcgaaaataaaagcaaaaaactggtaattatgacagatataggttatttcgaatttattgaaaacaacctaagcatgggataaaagctgcaaatctagaccttagcaaaagtacagcttacatttaactctcggttgatgcacggctttgcttctcctctatacccgattgagagaatcttcgccgaagaacttctagaacattttctatctttacatctttgcgccttagcaaaaccatagcatggtagatcacatctgccatttttgaggcaatgcatgaactgtcctttttctcctccagcattcggcacaactcatctgcttcttcccggatttttgagcacaagaagttttcatcaagtaagagccgtttagtccacgaaggctttccatgtttccctgctaactctaactctcttttggaaattgtagcctctaatgagtataaagttgtcaatgccaagttagtttcttcaacttcttgctccttaaacaaatcacctattgatgtgaaatagcatgtctctgaccctgtgtagc

SEQ ID NO: 17676 - DNA, 609 bp, Gossypium hirsutum
  Clone ID: LIB3831-001-Q1-N6-F2
catcgtaatcatcaccatacatcgcgtaggtacctgccgctcatttgcagatttttcaccatgctctcagcctttgagctgtctagtgatccctgctcttggaaaatagtgtgaagagctcgatgaacatctctagccatgcccttggcatcaccacacacatacaggtaacctccctgagaaatcatgtcccatatgtccttggccttctccatcattttatgttgcacatattccttggtaggtccctcacgtgaaaaggcaaccacaagctcagatagtgcaccactgttgacaaagttgttgagctcatcttcatatatgaaatccattttccggtttctgcagccaaagaacaatacagatggacccaactcagcaccagcttctttcagtgcaagcctttcctgaaggaatcccctgaaaggagccaatccagtaccaggaccaatcattatgatgggcactttagtatctgaaggaagtttaaagtttgattgcctgacaaaaatgggtgcccagctgcagtcatcgcttttccccgaggacacagcattcttcatccaagttgaacaaacacctttgtgaatacgacctgttgggcgtttc

SEQ ID NO: 17677 - DNA, 578 bp, Gossypium hirsutum
  Clone ID: LIB3831-001-Q1-N6-F3
agctgcaaattaccgagttccattacatgaggatatatatacagagactgatatttacaaattaaaagctaagacaaagataaacacaaaaccatatgcacatgaaaaagaaaagaaatatgtacaaaagaggttcctacgtccgtcgttcccctctctcggaaactccatgaaattgcagtgatagtttttttctccatcgttttaacgattcttcattcgaatcatccagtccttttattattgttaattaccaacttaattattaccgatacatatatgatacgcatatatagatgcataagatatatatatatatatgatatgatatgatatgatgaaactttaaccgaagcttgataatatgtacaaaaagtttctttcatatgtcgattcttcaaaaacggaagtcgccaaatttcctctctcaacgatccaaagcactcatcacaatcctgcaaacatcaccaccaatttaccaaagataatttggttaaacagttacaaacaaattttatttttgcaatttcataagtagtaaaaaaagaagagggagaaccaatcgtaaacagtcggac

SEQ ID NO: 17678 - DNA, 659 bp, Gossypium hirsutum
  Clone ID: LIB3831-001-Q1-N6-F4
gcaaagtaacttattattgccataaatttaatataagttgatacatgaactgaataggcgttaagcttcccgcccacaccatcaaaggcttctagtctttaacaataaacacacaaattcataggattctaaaaaaggaaaaaagaagaagataaaactgcaagccaagtggagcacgaccaattacttaaaaggcatgtttgtttaactttaagcagcaacactatggagcacaacagtctcaacagtgaggccaggtccaaacccaaagagcactccccactccaatccttctcctgtggtctgaagcccatcttcccttgatttcttcctcatctcatccaaaataaatagaacacaagcacttgacatgttaccatactctgaaagaacgtgccttgtggctcgtagcttctctggcttcagtgctaatttggcttctacttgatctaatattgctggaccaccaggatgagcaatccaaaaaagggagttccaatcggatatgcccaatggttgaaatgcttctaccaggctcttttctatattcttcgaaataagccccggaacatccttaagaaggtgaaatgtaagaccaacttcacgaaggtgaccatcaatcgcaccatcactatctggcaaagatcgttgggctgctg

SEQ ID NO: 17679 - DNA, 612 bp, Gossypium hirsutum
  Clone ID: LIB3831-001-Q1-N6-F5
aatcccaaactaaaaaaaatattaataatgccaataacaacttaagcgaggggaaaaaaacgggggacaaacatatttttggtaaaaggctagcggcaggatccttgaccaccactttacagccctgtgattagtggttgcagttgctgtgagttgatcctcctctttctgaggcgctcggcgataatgaaggcgagctcaagagattgggaggcattcaaacgagggtcacagtgggtatggtagcgtgaacccaagtcatcgaatgtaacagtccgggatcccccgatgcattctgtcacattctgtccagtcatctctagatgaactcctccaggatgacttccctcttgctcgtgcacgtcaaagaaagctctcacttcagcccttatggaatcgaaggggcgagttttgagaccacaaggagccttgatggtgtttccatgcatagggtcactgacccaagtgacaatttgcccagcacgacgcactgccctaattagatggggaagcttcactctcatattctcagcacccattcttgtgataactgtaatccttccagctttgttctgagggttcaaaatttcaatcagctttactagttcattc

SEQ ID NO: 17680 - DNA, 285 bp, Gossypium hirsutum
  Clone ID: LIB3831-001-Q1-N6-F6
gagagtaaataggagaattattagctccatgcatgtcttttaacataaaatactgatttgatacactactgttctccctgggagggtacgagactgggagctcacattggtccctatttatcaaacatttcatgctacatagttacatacaacactataattcaagggtaggtatatgcgattacactgtcggatcctcctgtgagccccccattgttggctgatgcacctgtgtgaacctatacttatgctacttgcaaggcttcttcgcgttttatgtcaaac

SEQ ID NO: 17681 - DNA, 581 bp, Gossypium hirsutum
  Clone ID: LIB3831-001-Q1-N6-F7
ataaatataaaatattttaattatgataaacataacacgaggacaccaactcttatatctaccaaaaacaaagctaatatcaatatccctgatgatattagctcagttactggtcccttagtattcttttactccccaacgcaccataatttattctaatacagtactaaaatgcaggctattataagctttgcctgccattaagtaatagagactaaaggttccccactttcatcccctgcttgcctcacaacaaaatggtgcctcacttggtgctcactggttgtgcctacaaaaatggtatgttgtcctataaccagtttcctcttcccttcaacatccactaagctcaggtctttgcacacatttaagctcactgtcacattcttggtcttccctttcttaactccaaccctctcgaacccgatcaactgcatgttcggtgcaccggtgacccctttcgtgctcggtggcttccaaaagaggagaaccacgtgatctccgtccattggtccattgtttttaactccgatcatgaggttgaattgcaggtcgtcgcagtttgaaacgcttgatgcgtc

SEQ ID NO: 17682 - DNA, 615 bp, Gossypium hirsutum
  Clone ID: LIB3831-001-Q1-N6-F8
gtgtaaatgttgtccttgaaaaatcactctacttgtttttgaatatgtcgaataaaaacactgaacgtatttaagaagaaagtctaaagcgacatagattgaaaacattgacaagaatttgtgctaaacttctgccctcccaatgtgtcaatcctttctccgaacttttcttgataaatggagaaaggaaaaaacttcattgctgcactgccctatccaacgccctgaatatccttcaatgataaagcctctcaagtctcgagtgtttaagcttttccttcaatttcacgctttattcgaagggcggctctaacgacatttcctcttgtgatgatacccaccagcttgccctctacatcaacaaccggaagcctgcggtattttgtctcgagcaataatctagcagcatcctcgagattagttgtttcacgtacaactaatggagctggtgtcattaaatcaccaacgacctggccattcgtcttgttgagtaacttctgtacctcgttgaaagtctgcaaaattgaggatttccaagtgctatcaacttcaggaaacaggtcattctcagtccgtcgcccagatatggagtccaatgctagcaagtcataatca

SEQ ID NO: 17683 - DNA, 526 bp, Gossypium hirsutum
  Clone ID: LIB3831-001-Q1-N6-F9
catctattactgatacccgagtatataatagaccacaagcatcaaatgtgggaaacatgacatacattactcgctagaaaataaatagaaacgggtatcaccacaaaaaaaaaagtagaaatgaaataaaattaacacaacatagtggaagacgaaacagtgctaacacaataaccagcagtagggtaaaagttttaggcaaggatttcctccaatggcttggcttcaagcttgggcttctcattctcagcctctttctccttcaactgttgctgctctttggccagcttcttcagcctggcaagctcaagatccttgctcatcttcctcctatacatctcagcaaatgtgatgggctcctcaaggattggtttatctccctctctgatcttcaatggatacactgtggcatcgggtgctggattttggaacgtggctattgacaatctgctgcagtctgagttcaccactgcttggtgatcagcattcttgaacctcccattgctcagataatggccatggtctc

SEQ ID NO: 17684 - DNA, 501 bp, Gossypium hirsutum
  Clone ID: LIB3831-001-Q1-N6-G10
gaactaaacagctccttttttatttttaaaacgagggagtaaacattttacaacgattcaaactaacagcttcgagtgaatcggtttacacagtgaccccagaatgtggacccatttcacaaatatcaccatcggcatcgttgttgtttggcagttgtgccattttttgaacattaaagggataagctatggccttggattcaaaatcgtaagcctcaactgcaatgacctcattccatgcatccgaagtatgaaccgcatcccaaaacacgtactgacttcggtcaccgcatggctccgaacctgggatacaaaaatctccaccactccctatttcacagcagctagcatttgccactgtaaaaccaagggaatttgctgcgcttgctcccgtgggatttaaatacgtaaatttagcgtcggggaagttgctattcagttcatcaacaagcggtacaagccttttattgaaaagttgtgctgcagtgttcattttttcta

SEQ ID NO: 17685 - DNA, 605 bp, Gossypium hirsutum
  Clone ID: LIB3831-001-Q1-N6-G11
atatacgcttcaaagcttgatttagattgcatttcattttgccatcatgtataaccttatataatacaacataccctacagtatcttaaagcaacggggataataacaataacatacaacaaccgaaaaaagaaatgtagcattcgactatctatctataaccggagaatggttcttagtgtgtcgcataggttttggatggtttgctgctcctgtgttgcttgcaactcttgaagcggcatctcctcgtagcacattttgtggtaagctagggcctgtgccaggttcattagcgtagaacttgaagtgagtctttggtaaacactaggaggaagtggcacctcgttttgtgttcttcgacctttttttgattgtccatcaccggcaaaaagttcctgcagtgcttcaactgccacatttccagtgctatcctgctgcatgcctccgaggatattgtctgataaaagggcaattggggatatatccgatgcccttaagaatggaatgggtactgtattaccagctgcatatattgaaaagagcttatcttgtaaagcaaaacatttttcttgctgacggtttcagtcttcaatttgctactactg

SEQ ID NO: 17686 - DNA, 641 bp, Gossypium hirsutum
  Clone ID: LIB3831-001-Q1-N6-G12
aacccatatatttgatggaaaaaaaaatacaaccatatacagaatacatataacccaaagaagagaagataaaaaataatagcattcaattgttgcattacattcattcaacaaacttttgttaataaaagaaggccacctaactgcccaatgtagcatagataatgatctgcagttccataacaaaattctcatagcatgtggagaaatcaatcaatgcccaaggttgcatagggttcaaaccctccagagcaatcatcatgaacacgccatatggtctctcccagaaggtttgccacagagaggacagtcaactgaggaaaatagttttgctctgacactgggatggtgtttgttatgattacctcttggaaaagaccaattgacaatctttctattgcaggaggactaaaaacagcatgtgtactacacgcatacacttcccgagccccctcttgatgcaaaagagctgcaccttttgcgattgttccagcagtgtcaatcatgtcatccaccataactgcaacctttcctttcacatcacctatcaaattcatgacctctgcaacattatgcccatgacgccttttatcaacaatagcaagaggtgcatcagataaattttttgcaaaacacgtgct

SEQ ID NO: 17687 - DNA, 624 bp, Gossypium hirsutum
  Clone ID: LIB3831-001-Q1-N6-G2
cggcaaatgttcagttcataaacatatttaatgagtagcatcctcagtaggttgaaacagcatccatttttttacagctacagttcatactttaatggtggaaaacttcatcccaaagacttaaaagataatgctatgtcctccgaacatgaagtggtatgagaggttgaaacagcatccttttttattacagcaacagggaccgtaagctccacttataagctcctcctgcttgcagatatctcctttctgttagaattctctttccctacactgatgctctttgatcgaagagagggcgaatcaagatttagggagcgcatagataatttagcaatctcagacatagctgtatctcgaactccaggaacatcactcgatagatattcataagcagcctcgaatgcttcaagccaaaacctcggcaatcgaacgcttgcgctgtgcgtataaacatcccacatcttcctcaccaccttctctctttcttccaattcgagaacgtcaagatcatcatagacagagaaatcgatgtcatcggaaaatgcagtaagatgaccagaagaccatttgagagaaacagagccagtaaacatggaccagaaagcaagcagagaattgcag

SEQ ID NO: 17688 - DNA, 579 bp, Gossypium hirsutum
  Clone ID: LIB3831-001-Q1-N6-G3
agacatgcaagatacgtcgtcactcgattgcatttccataacttgtacaagacattcgaaaatttcagttgttcaaactactgagataaataaattggagaaagaaaccgtctctgacaaactataactgatgagagcaaagattgtaatgggaaatgaagaagtagaaggaatgaacaaacccaaacatcttggaacaatcgatttgacactagaaacttgcgttgttgttctttgtgtctttcatcgagcatcagctgatgcgaatgaatcagcaaaacctggcggccggcatggtatgctggtctgtgtagtgtctgtacttcccagaaatgatgaggagtcatccacattgctgttcccctcgaaggcttgccactttttcaatgcttggggtaaagttaattcaaggtcaatgccatagatgtcgtcggaatcgggttctgctggtttccagagctctgctagtgatgacagcacattgaccgcatggctcatatctggcctctggtagggctccctggcacaacagtggccagcaagctcagtcactgtgctaacactggctagcgtttcctc

SEQ ID NO: 17689 - DNA, 607 bp, Gossypium hirsutum
  Clone ID: LIB3831-001-Q1-N6-G4
ctaatacaacaaaatctcaaacttatattaagtaacatcacaaaataagtcgatgtttatcacttagtttcaggtattatttatgtataagccaaacagtaaaaaagaaagaaaagaaaagaaaaacaatcacagcaaagcctgtgaaaaaaacagttttacatctaacaaaggtactttcacaaatataatttctatttttctctacttattcttcaaactcttctcttcattatctctgtgtgtatctgtatttgtatcgatatgcctagtgttttagttttgctcaagcatcttgttgcttaagaaatacaagtatcttgttgatcagcaaatatatccaacagggaaagtgcctcagggatgttgagttcaaggcggaattttggaccatcgtagtgatggagaattggcctaaatgaatcttcttcaagaggctcgcagattttccttgtaataacccgaacctgagcagggaatcgagattcgccagggcatttcttgtcctcccaggcagttgggtcaatgtttgttccaccaaagcttgcagcctcaaaaaaccatggagttggtgggtggagtagttgtagaggaacagaggtaggcc

SEQ ID NO: 17690 - DNA, 619 bp, Gossypium hirsutum
  Clone ID: LIB3831-001-Q1-N6-G5
aagtgttgaaacaactattctttcaagttggctttgcaaaaataacaaaatcaaagtttatgctttcctaaagaataacctcctcattctatgagcaaaataccatttaacagattccacgtcctaaaggattaagcaaaacatgatttaacaaatatcaaattaaaaaaaaaaaggagttgcatatcttgagctaattcactaaatataataatctgaccggtgtcatccttttccaaaatcattagtagagggagaattctctgttcacttaaaccagcttcttctcagaactagcagcagccacacgttggcgcttcctccaagctgggattttaccagggaatgcccatcttaacaacctctcccaagcatagcagcacagaaacattagtagagcccatagcaagagcttatccctcaatcccacaggcaaaggaatcaagctcaaccaatcattcaaatccctaaatagatcagaagttataaccacaaagaaaccggcagcagctccaagagcatacaagaatggtttgttttcagggatgctctggttgaaaggatgacccatgtagttcactgcaaatgttgcttacctgagcatcatgctcaccatgta

SEQ ID NO: 17691 - DNA, 394 bp, Gossypium hirsutum
  Clone ID: LIB3831-001-Q1-N6-G6
atcacaacgatgattattttgcggcatgtttgaaagttcaaaatctattgatttacactcaaattcactcacaaacactgagaaacattgaattttcagaggcactcaacccgcgcacacatcctatcgacccggtttcagtttcaaagcaagttctattaatttacaccacaaagcatatgaatcttgaacctaatagtgccaacaactcctcaaatctcaataagatcacctcctccactctacttgagtcgccttggcatttctgtctctggatgacagtggtctgtcgcttttgctcccttccttccctgcatgaaccagtctctgcgtccttggtgactgtgagtggattttactattggctgaaattggcagggactggcgacgagcg

SEQ ID NO: 17692 - DNA, 631 bp, Gossypium hirsutum
  Clone ID: LIB3831-001-Q1-N6-G7
atgaattacaatacaatcatttcttacaatcagttaaaagtaacataaacatggttttatttgaggactacacaattctaaattctacccatgactctcttcactatcttataaaagaaacaaaatactatacagcaggactatgtaatatggtacagcatgggaaaaagtagtacaaagatcagcagccggatcaatcttaagtttcgtacacataggagggcaactgctgatcaagttagattggggataacgagtgtggtagattgaagccatgttataccccatcagcccacaagattggccattctggcattctctgactacaagattccggtgttcgtaagtgtttatccagtttgagataaacgcctccagtttactatttggtgggactgtggatgccttggtaaataagatgagctcgtaccaatatcgttttcatcacctatgaactgctctgaataactagaagctggaggagaccaaactggaacaactccgccatccctttctctcctactactgctagtagatgaatctgctgtggaatcctcagcatttcccaaccccattgggagattaaattgccgaaaatgttgttgttacgagctgttagctgaattccctg

SEQ ID NO: 17693 - DNA, 426 bp, Gossypium hirsutum
  Clone ID: LIB3831-001-Q1-N6-G8
ctgggtggaaccaagtcaggaatctaaaattctttttttttttacggggaaagaagggggaaagaagggggtaataatagattcccgagagaaaggggtaaaaaaaattcccacccgaaattaaaaaatgggcccattcttaacctagggaaagcccatcggggggggatggaaataaacaaaaacaaataagttttagctaagggaaaaaaaataccaatggggggcccaaggatcccatttattttatttatttaaaatagctcaggggcgaatacgtccggaagggaaatattccaaccccccaaggaaaaaactgttccaaataacgaaaaaagtaatagttttagatgggaagcaacgtaaaataaaccaaatttgatacctgaatattcggttggataccctgctactaattcttcctcc

SEQ ID NO: 17694 - DNA, 592 bp, Gossypium hirsutum; identical to SEQ ID NO: 17643
  Clone ID: LIB3831-001-Q1-N6-G9

SEQ ID NO: 17695 - DNA, 445 bp, Gossypium hirsutum
  Clone ID: LIB3831-001-Q1-N6-H10
ggaagcaaggccccttttttggtgttttcagtttcactggggcaagctttaaagaacagaacacgaatccccaatgggggcaggttacaacaatttaaaagagccctttgcaaggggccttgttgggtccaaaacccttgcccttactggactggagtgggggcttcattgcctcctggaatccaactttttttgggggaggcccacctgggggaccacgtgttgggggagttacagtcattacgggttccgaataatcattctgcatagcccagtccatatttggaataggcttgacagattctgcataggttaatctggagctctcagttgaaaaattcttgagcaaaaatcaaaagggcttcgtccaatgcaattgataacagcaatagcatggcagcctggtaaaccagtaagttggattacaggaggcaatgaagcaatg

SEQ ID NO: 17696 - DNA, 604 bp, Gossypium hirsutum
  Clone ID: LIB3831-001-Q1-N6-H11
gaaaataaagcctatcttatttatggcagttaatggaaaaagctacatcaagcaacttcttaaaaaacaccaaaacccagtagccatagaagcagcatagcataaaaaaaggagcctaaaaagaccagatattatgaaggaaacacaattcaataagccctttttcaaagctgtccacagtcagcaataacaacaggcttggaagtcctcccaccgctagaccccaccttctcaatcgctttaaccacatccatgccttcaactacctgtccgaacaccacgtgctttccgtccagccactccgtcttggtcgtgcagatgaagaattgagatccgtttgttccgggtccagcgttcgccatggaaaggatgccaggtcccgtgtgcttcttgatgaagttctcgtccgcgaacttggctccatagatggattcacctccggtaccgtttccggcggtaaagtcgcctccttgacacatgaaattggggatcacccggtggaaggatgagcctttgtagtggagaggtttgccgctacggcctacccctttctcgccggtgcagagagcacggaagttctcagcagtccggggagtgcaatcgg

SEQ ID NO: 17697 - DNA, 614 bp, Gossypium hirsutum
  unsure (1)..(614): unsure at all n locations; Clone ID: LIB3831-001-Q1-N6-H12
cgtacaataatagctattaacattaatgttctcaaaacccttgaatattaaataataataagcaccacaatacagtctccagctccaaacatcctcttaagcaaaatgcttaaaagatggaaggtaagcaagtagggaattaagcaccaattgtccgcccaccgccagccccatagggcccgtcatcttaatggtggcgatacggtgaaaggctaaaataatagtacattaatatcaagtagaccatcgtacaatgatccctaacttccccgacataaaccagacttttgagttcacttaacacggcacaccaaaaaaagccaactaaatgcaaaatgtagaccaccatcaaaagcaattacaaaacttagaagcacttcctgtggacaatggatggaccggattcatcatactcacccttggaaatccacatctgttggaaggtgctgagtgatgccaagatagatcctccaatccagacactgtactttctctctggtggcgcaacgaccttaatcttcatgctgcttggagcaagagcagtgatctccttgctcatgcggtccgcaataccagggaacatgngttgaacccccactgagcacaatgttacc

SEQ ID NO: 17698 - DNA, 563 bp, Gossypium hirsutum
  Clone ID: LIB3831-001-Q1-N6-H2
ggaaataagacacccgataatttattgattattcatcactaatctatttccatacattacaataacttattgcaacccaaagcttaccacaccgaacaagatgccatcacaataagctaagagacttgtacgtagtagtttaagcccataaaagaaaaatgggaaaaagagtacgagctcaacagggggattatagatttctactctagttcttgggacatgggggttcgaaagcgaagggcccaaccctgtaaaaaacatatgggagcttctttgaagtaaatggtttctcaagcttcaagggggcgcccttcaatccaccgtttaaattaaatggcttgctgcatgctttcaatggggaaaataccagggagaccctgcaattgtggagatcaaaattgtagatggtaattggtgcttgcaggaaaaaataaccattcttgtcagtcttgaactggaccgttaattcgtttttagcgtctttgcatgtcaaccttacggtggcactaagaattggtttagctcccaaaagggtgtcgactccggcgtacttgcatgacttg

SEQ ID NO: 17699 - DNA, 636 bp, Gossypium hirsutum
  unsure (1)..(636): unsure at all n locations; Clone ID: LIB3831-001-Q1-N6-H4
gaagccaaaaattaatcagataaaaaaattgaacatttgaaacaaaccaagataactcaacacctacaatgtgtaagaaaccaaaattgccttaacatttaaccatacagtgacaataagaactgaccaccacaaactaacaaacaaacttcttcaagtttcaaccctgcacttctccatccacaatctctctttcttcagcagaagctgccattaattcatcaaagttttctgtcttccccaacaatatctcaatctttgctttttggactggtcgccctcttgagtcctccttcatgtcaactgttgaggttgtgatcttcttctcaacagctaaaccgttgtttttcagaatttctgcaattgtgacaacagttgcaatagccatgccaagggcagacaactccacctcattgtgctgctgcatatacctcttggcaagattaacgtagaaaaacaagggcttcttggtattcgagacttgaatccgattcttcttgtgggaatcggcgaccaagttgatgttgttgacaccttgngtgatttcttccatttacagacttctgctaaaccctaaatctcagcctcactctgcaaatgggacgaaatctgcagagtagtagtcaatcaattcta

SEQ ID NO: 17700 - DNA, 621 bp, Gossypium hirsutum
  Clone ID: LIB3831-001-Q1-N6-H5
agaagagaaataaagcagaatatgtgtttaattcatctgttgaaattgccattttcctcttctttccctaaaagaattcgagcaatttcctgtgcagacaattcccttcgcttgataattgatcataactagaaccacaaaaccaaagacctcccatgtatatacacatcccaaaacaataattataagagcaacccagctcttatatgtttttttctcaaaaattcaagtggggaaaaaatgtattcatctatttgatatgataggaacgggagcataccgtgtcaagtgcctcagtaaatacaccagaaaagctggttaatgctcgaaaaacgccgggcaagcctgtttgaagattattcagggtcattgctctagttacctctactgctttggcatgcctcatcatttcatcttccacccgcctttgacaggctgcaagctctgatttcttttcagaaaaggggatcccgagcatccagaaccggtccatgatcagatcctaaatcaggaggccccataccaaccatagagtacgagtggtagaacttcctttctatgttccggagagatgatgcctttttctcaagctcctttgatgcattttctgtttgcttctta

SEQ ID NO: 17701 - DNA, 595 bp, Gossypium hirsutum
  Clone ID: LIB3831-001-Q1-N6-H6
caagcaaattactaaaacaagtgttattgtaaatgccataaaaaggatttaacaattttttcatgcttcatattgctactagacagtatgagattgccatgaaattcaaaagacaaatttgggaacaacttgaatccagaattacaatagaaccaaggaaagatgaattgagaacttaaaaggtttttctacatataaagtccttctggaaccccttctttcttcttaaacatcaccttttccttggccttcttaaagtctgcatgtgtcaccttcatgcgtcgctctcttaaagcaagcaaaccagcctcagtacatattgcctttatatcagctccagagaactcatcttttgtcatcacaaattcttccaagtttacatcatcagccaatgtcatccttgatgtgtgtatctgaaaaatgcgcctccttgttttgatgtcaggaagggggaactcaatcttcctatcaatacgaccaggacgaagcaaagctggatcaagactttcaattcggtttgttgcaagaatcactttgacgtctcctctcgaatcaaaccatccaattggttcagcaactccaacatagtcctctg

SEQ ID NO: 17702 - DNA, 644 bp, Gossypium hirsutum
  unsure (1)..(644): unsure at all n locations; Clone ID: LIB3831-001-Q1-N6-H7
aacatgaaagcaaattgtctggcattttcatttttgggcttcactcaatcatgggagtgaaggaaatggatttgtaaataagcgaaaactccaatcatatcataatttattggaagagaaagcacaacaaacaggatggttcttagtaggaaagacttggtaacaaaacagcataggttcatttgcaaagctcagcggagagggtattagctaaggaggaaatggtagttgcagacactccccttgttcctcctaagtaccatttcttgatcatctcgaccacattcgaattctctactttgatttttgcttcctcctttccctccgtcgtgaatgcaatctcagcagtggctgaatttgctggaaaatggtaagtgatgactgaatccttcttgaaatatttagactggaagaattcaacaactttttccaaggcttcttcctcttcctcttcgtatttgtcgtcagctgccaatcggtccctcacagcactctctagctgcactccatattgggaacctttgatctccttaatcaccacaactctcagaaacttctccactggagcattaataagagcctcgaaaagtcatcatcttcagctagcacgttcccagncttccccttccattgttgcaaatgtc

SEQ ID NO: 17703 - DNA, 591 bp, Gossypium hirsutum
  unsure (1)..(591): unsure at all n locations; Clone ID: LIB3831-001-Q1-N6-H8
aaacagaaacccaatgtgaattcatagaacataaaaccaagtcctacaggttgattgaatatttcatattaataaaatttgaacggccttttcagaatgcaacctcatgaactgaacttgtatccaagtctctgcaaatatcataacagtacaggaaggttaaagatgtgagtcccaaacttccaacaaagtcatggcaagaggtaagaaatcaggttcacaagagctccaagaaacatcagtcctctccgcatataaccaccaacggtgtaaatttgcatcacttcatctctgccatgaacttctcatactcagtatctgcaccataggttgttttctctccagaggatgctgccggagtcaaaagagggtttggagcccaagggacattactaaggctctgagaattatctgtggaagatgtaggtagtggaggagggggagggggggggaactgcattgtnataagaagagtaacctaaagaagatgtaggatatgcagattgtgaatttggaggcattgcagtcattgagttcccgtagatattagcaggcatagctggggcagacgtgctattttcagattgcact

SEQ ID NO: 17704 - DNA, 507 bp, Gossypium hirsutum
  Clone ID: LIB3831-001-Q1-N6-H9
atacactgcaaatacaataaatacgaatcatccacataatcatataggtatcccttcaaatgcacggataaactcacacagatataaatggggtatcaacaatgagtaacaaagtgcaaatcaacaaatattttacagacattaatagagacaatgagtcattagcagtagatcacaaccatatgaagaactgcttcatgagttcttctcaacatgctcatctttcaatggctccccatcattagtctcctttgtcgatggtgaaactgaagaatgcatattcttaagctcctctaactctttgcaagcatcctcatgcttacacaatagctcattgtactttgtttgcaaatctgaaatctcagcttgtagcttttcatattcatatatagttggaccccctaatttttgttgtatgaactcaagggctgaagatggcttctcattttgttcatacaatgcaaccaaaactttggtgagagcatcaacagctccactggactcaag

SEQ ID NO: 17705 - DNA, 666 bp, Gossypium hirsutum
  Clone ID: LIB3831-002-Q1-K6-A1
gttcctgcgtacttcaatgatgcccagagacaagccaccaaggatgctggcattattgctgggctcaatgtggccagaattatcaatgaaccaactgcagctgccattgcctatggtttggacaagaagggtggtgagaaaaacattcttgtctttgaccttggtggtggaacatttgatgtcagtatcttgacaattgacaatggtgtattcgaggttctttccacaaatggagacactcatttgggaggtgaggattttgaccataggattatggactacttcattaaattgattaagaaaaagcatggaaaggacatcagcaaagataacaaggctcttgggaagcttaggagggaagctgagcgtgccaagagagctctcagcagccagcaccaggtccgagtagagattgaatcactttttgatggtatcgatttctccgagccactgaccagggctcgctttgaggagttgaacaatgatctgttcagaaagaccatgggacctgtgaagaaagcaatggaagatgctggtttggagaagcgacaaattgatgagattgttctggtaggtggaagccctagaaattccaagttcaacagctcctcaggactacttcgtgggaaagagcccaacaggtgttacccggtgaacattgcttat

SEQ ID NO: 17706 - DNA, 550 bp, Gossypium hirsutum
  unsure (1)..(550): unsure at all n locations; Clone ID: LIB3831-002-Q1-K6-A10
gnaaaaagtaatagtacataagtaaggaaaccaanaagggcatctgaaaccacatgtgatatataatgtacctatagacaaggctgcataatggaagatattttgtatggaagatttatcaatggtggcccaaagaacatgtgaagaagaagacaaatcatactggaactaaaagtggttgatgtttatcatactttcatttttagtgctggacaaacattaattcatgccattcatcccccttctctcctgtcaataataaacaatccattaccaatcaacaaccttattctcatcttttttttttttggggggggggggggggttactttaacaggtgggaattgtaaaaaggtgatcagattatgagagtcgacatgagatccacttaattatcaaatttcttgggaaagaagggattatttatatctattcccaaaatccaaaaccaaaacaatccattctacatatgctgaagcttcttcaagcaacattaaacttcaatggtgaatattcttatgccttgctataaggtatatatgatgatggc

SEQ ID NO: 17707 - DNA, 635 bp, Gossypium hirsutum
  unsure (1)..(635): unsure at all n locations; Clone ID: LIB3831-002-Q1-K6-A11
tcccaaatttcaatttctttttcttctgattttccatgttagggaagacaggtcgacccatgatcggaaacttatctgaattactagttccaacacacaaatccgggttattggatccttcaaggagccccaaaagtccactagacttattcaagaccccatcatcatcatcaagaagaggggggatgaagagatgctatgatgtttttggtgatggagtagggcttggaatcattgctttaatggagaaatccactgttgatcatcgtccttcttgtaagctacaacacaccatttgtagattcaaaggaagatttcaagaaaattcagaagaggattacacttttgttacaagacatggagaatcatctacaaaagtttattttaatggaggtgaagaagaagaagaacagagacttgttggaaaaattaaggaaattacatctttaaaacccagatttgtgcaagatttcaattacccaacatcagatttcctcagttcttgtcatctttgtaagaaaaaattgcatggcaaagacatttacatgtatagaggggaaaaggctntttgtagtgcagagtgtagatcaagtcaaataatgatggatgagaggaaagaacatgtaaatcaaaag

SEQ ID NO: 17708 - DNA, 685 bp, Gossypium hirsutum
  Clone ID: LIB3831-002-Q1-K6-A12
ggcaagtccaggtagtcttcagagcgggctgtcgcgccaactctttgacaagtggtgttctgagaagaaaaattcttgtgttattcctggttatgtcgttgaagggactcctgcaaaaacgattattaatgaaccgaaggaagtgactctcatgaatggtctcatggctcctttgaacatgcagggtcattacatttcattctcggcccatgcagactatgcacaaacgagtacattcttgaaagagctcatgcctcccaacataattcttgttcacggagaagcaaacgagatgggaaggcttaaacagaagcttatcactgagttcactgatggcaacaccaaaatcattacccctaagaattgtcagtctgttgagatgtattttagctccgagaaaatggctaaaacaatcggaaggttggctgaaaagaccccagacgtaggtgaaactgttagtggtgttctggtaaagaaaggtttcacatatcagataatggctcccgatgatctccacatcttctcacagctttcaaccgcaaacatcactcagaggatcactatcccattcactggcgcctttggtgtgataaagcatcgactcgagcagatatacgagagtgtggaatcttcaacagatgaagagtctggggtttcaacattgcgagtgcatgatagtgtgact

SEQ ID NO: 17709 - DNA, 102 bp, Gossypium hirsutum
  Clone ID: LIB3831-002-Q1-K6-A2
gtcctcgtgccaatctggttttctgcgttgtcttttaaagaatctttgatgccaactgatgtttttttcttttctaaataaaggtgtttgagacttcatacc

SEQ ID NO: 17710 - DNA, 602 bp, Gossypium hirsutum
  Clone ID: LIB3831-002-Q1-K6-A3
gaagatctattttgcgggatttcgatggctgctccaccagcaagagctagagctgattacgattaccttattaagcttctattgatcggcgacagtggtgttggtaagagttgcctacttttacggttctcagatggttcctttacgaccagctttatcaccaccattggtattgattttaagataagaaccattgagcttgatggcaaacggataaagctccaaatttgggacacagctgggcaggagcggttcaggacaatcacaactgcttactatcgtggagccatgggcatcttgctggtctatgatgtcacggatgaatcctcgttcaacaatattaggaattggattcgcaacattgaacagcatgcatcagataatgttaacaagatattggtcggaaacaaggcagacatggatgaaagcaaaagggctgtgccaacctcaaagggacaagctcttgcggacgagtatggaatcaaatttttcgaaacaagtgcaaaaactaacctaaatgtggaggaagttttcttttcaatagcaagggacataaagcaaagactcgtcgatactgacttaaaggctgagccttcaacaat

SEQ ID NO: 17711 - DNA, 691 bp, Gossypium hirsutum
  unsure (1)..(691): unsure at all n locations; Clone ID: LIB3831-002-Q1-K6-A4
cccacgcgtccgctttttttcccctgaaaatctcagatttagctttaaaaaaaaagaacagaaatttatttcaaaaaaagaaaagaaaagaaaaaagaaaaagaaattagattcaaattcaatctttaataaacattcaaagtcttttatgaaaatttaattatctatttgtatttttttaattaatagcaataaaaaagagataaggatgcagcaaaacggtggttcggattcactaacggaacagaatcaacggcctcaacaacaaccgccgccgcaaccgcatccacagtgggtggctatgcagtatcctccgactgctgcggcggctatggtaatgcagcatcaaatgatgcaaccgcaacactttgttgcgccgccacctcctccgcctcaacactacgtcccttatcatcatcagtatcatcaccacggtcacgcgctgtcgcagcagcagcagcaaggatctggtggtggcggcgagaataagaccgtttgggttggtgatttgcatcattggatggatgagaactatcttcatagctgtttcgcttctactggcgagattgtgtccattaaggtcattcgcaataagcaaactggtttatcagaaggatatggatttgtggaattnttttcacatgcanacggcagaaaaagtcttcaaaatatagtggcatgttgatgccta

SEQ ID NO: 17712 - DNA, 673 bp, Gossypium hirsutum
  unsure (1)..(673): unsure at all n locations; Clone ID: LIB3831-002-Q1-K6-A5
gtaaagtaaaaaacaccctgcaacatatagcagtggagggtgcangaaaatcttgtctcagatcccgatatactcacaccattaacctcatataaacattatttctctttcttccaataagaacacacacacacactccacaatataggctctgatcaccttacttcactctcaactttcaaccacaagggtctttctttgtggtccttaactacttgattgatgatcatttctatatacatatatcaataccacctttttttcctttctttactccctttttcagttttcctctaatacgttatttatatatagggggggttgtggttccgagaaatgcaagaaccagggttaggtatgatgagtagtggtggtgggagtggtggaattggagggttaagcagcggagaagtgtcggtttccggtgagcagaaccgacagctgaaggctgagatagctgttcatccgctatatgagcagctattagcagctcatgtttcttgtctccgtgtggcaacgccaatcgaccagttgcctttgattgacgcacagttagcacaatctcataaccttcttagatcttatgcttcacagcatcatcaacatggtcattccctatcaccccatgaaagaaggagctcgacaacttcttggcacaatatttgataggtct

SEQ ID NO: 17713 - DNA, 560 bp, Gossypium hirsutum
  Clone ID: LIB3831-002-Q1-K6-A6
gctttttactttcgaaactctcacaaaaaggcctctttcaattgctttgctttagcattcttgatggctttgtcatttgcaagcattcatgttggggtagcagctcgtcaccttctgcagcagcctcaaacgccaagtttgttaaaaaaaactttcccaccattgccatcattccctaaaccatcattcccaaagccatccataccatcattcccaaggcgtggggtgcttcctccacttccttccagatttccaagtggaccaaaggccatactgccccctttgccaagcattccctcactcccccaaatccgaactacaattccctctattcatttcttttctccaccactttctcgttctactccttgaagtacccctttttttttaatctgcggcatactggatctggtttaataaggtttttagtcttctttgtgtctttattatgagtattgatttcgcccacttatatttgtttgtataaatgggagttctccaattcccattatttggtgtactttgatacgttgttgcttattatatatggggtatttata

SEQ ID NO: 17714 - DNA, 567 bp, Gossypium hirsutum
  unsure (1)..(567): unsure at all n locations; Clone ID: LIB3831-002-Q1-K6-A7
gtccactagtaccngaanaacagataatatgcaaggcctcagtaccttcaactccatctacccctattagcaaattggagagtccaaatttggtgaataccatgggatctgatgctgccaccggcatgatgccttctgttccacaggctcgcaaagcttccttggctcggtttttggagaagcgcaaggggaggataatgagtacagcatcaccatacaatcttagcaagaagtctctagattatgcaactaccatggaatcgaatgcataaacaaagtttatggcgatctctgcagcaactaaggaggggaaactccatgatttatgatttggcattagaagggaatgaatgcaaagtttatgtttggcattttgtttctctaatgaaaaaatatatttaatgttgactatgcttgattaccatcaactagagtttaatcagtaggtggtggtttaaggttataatagttttttttttttttttttttttttttggttgatattaatgttggatgttttagctactttgtaacccattcaattgttggtacatgggtgaaataatg

SEQ ID NO: 17715 - DNA, 630 bp, Gossypium hirsutum
  Clone ID: LIB3831-002-Q1-K6-A8
gctgaacaagatgaagaggtctatgttatgaacctcctcgctttccaagcttagatattccatttttcagctgtgatcttatatcaagtggcagcgataagcagcaagaatatagtccctttggtattcgccaactaatgatgtcatctatgaactgcatctctccatttagattgtctgattctccattatgggatgatagtcctgatgctaagctgaaaagtgctgccaaaactttcactggtacaccatccatattgaagaaacgccaccgtgacctattgtctcctttatcagaaagaagatgtggcaaaaagctggaaacagatatgacatccaatttgagcaaagaattctcttgcttggatgttatgttggatgcgagtgggactggaaacacatctcaggagtctccatctgaatgtaagaccaagtctggtgtcttcattgaagaaaaagaaaacctgtgtcaagcagttgatcaggaacaatacaatggggtagatcacactgaacctttagatgatgaaggtcagaagaaagattctaatggaattaattcccaaggagacatagaaaaggaagcctgcgttactgatgccaaggacaaaacatatgctaacgcttctg

SEQ ID NO: 17716 - DNA, 602 bp, Gossypium hirsutum
  Clone ID: LIB3831-002-Q1-K6-A9
gttaatttgtaagtggaaaggaaacaaagtaacctggctgattagaaaattcttgttgaaatattatgtgtgactcctcaatttgtgtaagcttcatattgatcttagcaatttattccaagcatctaatagctatcttttatttctttttctttccttaagaaagggtggtagagtggtatctcattttctctttttacagagctccctcagttaaggagtttgacttcagaggaactaggttgtgatgctcgtggctattctcgtgctggccgtgataccttgacctggtattgtgctatcctagctggaaggctggggccagaacttgatagcatgcgagaaaccatgcgcagggtccaagaaacattatcaaaatctagtgagttgaaggctgcaagtgaagatgagcactcaataacagctgctgttgctttaaaaagtaagcgattgacattaagctggcttgatggggaaacacaaaagaactactgttttttctaccttaatattgaaagtagttatgaaacatgtggaccaaggagagttccaactgatgtccctcggttattcattatccgctatgaaaggaatgctactga

SEQ ID NO: 17717 - DNA, 412 bp, Gossypium hirsutum
  Clone ID: LIB3831-002-Q1-K6-B1
cggacgcgtgggcggacgcgtgggccccccccctttcagtaagccgcaccatcgtatattccacagttcataggcacagagagagatgggtgaggaagtcaaggctgtgattcctgagtcgctcttgaagaagaataagaggaatgaagaatgggagcttgccaaaaagcaggagcttgaagctgcaaagaagaagaaagtcgagaaccgcaagttgattttcaatagggctaagcaatacgcaaaggagtatgaggctcaggagaaagagttgattcgattgaagcgcgaggcgaagttgaaaggaggattctatgtggatccggaagctaagcttttgtttatcgttcgaatccgtggtatcaatgctatgcacccgaggacgagaaaagatttgcagctcttgcgattg

SEQ ID NO: 17718 - DNA, 685 bp, Gossypium hirsutum
  unsure (1)..(685): unsure at all n locations; Clone ID: LIB3831-002-Q1-K6-B10
gccctttactaatacagagtaaagaacaggaaccaaagcaaaacccaaaaatggcgacggcactcgcaaacagagctgcgcaaaatcaaactactgggctattgagactctccttcaacttcttcagaaacctctcaactgcgacttccacagaaaaaactggcgcctcctcttcagcttccagggagcccaagagaaaaaagaagaagaacctcttcgaggtagctcagttcttacccaactgggggcttggttaccgcatggccaaaactcattggactgatgtttcatatcagatcaccaagatcaatctttataaggatggaaggcatggcaaggcatggggagtggtccacaaagacggtgctccaactgcagatgctcccaaaaaaataagtggagttcacaaacgctgctggagatacattccacatctgtccaaacctggagatacccctccaaccttgatgaaaccaacagaaaatgccccaaaggctgatgctgaactagcttgatgcattgctttaaattatagatgctggtaacttgattttgcattgttggctcatcctttgcagtcagtaggcatgttgttattttcagatttggtagggctntacagttcatttctcaatccacttgatctttcatgcaccaacaactntgtgctttaaaacctactcac

SEQ ID NO: 17719 - DNA, 652 bp, Gossypium hirsutum
  Clone ID: LIB3831-002-Q1-K6-B11
ctatcctaaacccctccaaatcttcttcttaactatctaaaagcgaaaaacccaaaacaaatgtcccagaaaacaatggaagtggtgaagaatttggacatcaaaagatcatgggaaggtggtacgagatagcttcattcccatcaaggtttcagccaaggaatggggtgaatacaagggctacctatactttgaatgaagacggaacagtgcatgtgcttaacgagactttcactgatggcaaaagagggtttatagaaggcactgcgtacaaggcggatccccagagtgatgaggcaaagctgaaggtgaaattctatgttcctcctttcttgcccatcattcccatcgttggagattactgggttttgcaccttgatgatgattatcagtatgctctcattggtcagcctagcaggaattatctttgggtattgtgcaggcaaacacatatggatgatgaaatctacaatcagctggtgcagaaggctaaagatgagggctatgatgtgagtaaattgcacaagaccccacaaagcgatcctccacctgaaggagatgacactcccaaggacaccaaaggcatttggtggatcaaatcccttttaggcatgtaggaaattaagaaaagtttgtattcatggtttcgtgg

SEQ ID NO: 17720 - DNA, 643 bp, Gossypium hirsutum
  unsure (1)..(643): unsure at all n locations; Clone ID: LIB3831-002-Q1-K6-B12
ctcgctccctctctctctctcttgcatttttattttcttaccaaagcattcaaggtactgtagagaagcagccctggtcattgctgacaatctcgcctaggattcagcaaagctgctgttttaggaaaggtctcttcctccttgtaatctgtctggtctgaaaatggggaggcactcttgctgttacaagcagaagctaaggaaaggtctttggtctcccgaagaagatgagaagctcttgaggcatattaccaagtacggccatggttgctggagctctgtccctaaacaagctggtctgcagaggtgtggaaagagctgcaggttaaggtggattaattatttaaggcctgatttaaagagaggtacattctctcaagaagaagaaaacctcataattgaacttcatgcagttttggggaataggtggtcccaaattgcggcacaattgccaggaagaaccgacaatgaaattaaaaacctatggaactcttgcttaaagaagaagcttaggcagcgaggcattgaccctgtcactcacaagcccctctcagaggttgaacatggtgaagacaagagtcaaccacgcaccaacagcanggatatggcttcaagtgaattgaacatcaacaccaacaatcct

SEQ ID NO: 17721 - DNA, 685 bp, Gossypium hirsutum
  unsure (1)..(685): unsure at all n locations; Clone ID: LIB3831-002-Q1-K6-B3
ctcttctttcaactcaaagaaactcccagtaatattagaatcatgggtgttgtcacttataactatgagtctacctctccagtcgcccctgccaggcttttcaaagctttttctcttgaagctgacaaggtttggcccaaggctgctcctcaggcagtcaagagcgttgaggttgaagctaatcctggccctggaagtatcgtaaagatcaactttgctgaaggccttccattccaatatatgaagcaccagattggaggacatgacgacaagaatttgtcatacagttatagtttgatcgaaggtggacctttgggggacaagcttgagaaaatcagctatgacaacaagtttgaggcagctgcaggtggaggaagcctttgcaagagctcgatgaaatttacactgttggcgactatgtgatcactgaagatgaaatcaaggctcaaatcaaagggagtgaaggagtttacaaggctgttgaagcttacctcttggctaaccccgatgcctgcaactaagatatatgttggttgctttgaattctcttgcttgattntaaagaatggtgtgcttttggtattttcctttttactcttaaaactnaaaccgtcttccggttgtcttaataaaaatgggcggggtaattgatctttgatcatctttgatatatgatgaaataaat

SEQ ID NO: 17722 - DNA, 640 bp, Gossypium hirsutum
  unsure (1)..(640): unsure at all n locations; Clone ID: LIB3831-002-Q1-K6-B4
cttcttcaatctctgttccatgccctaaggtctcttcttttgttaaaccaaagcaaacccaaaagatctcttttgctcttcctccttcttccaagtcttgtttctcatttggatcttcaattaaggtccctgcattttctggatgccagtggcataatgagaagaaaactatggccttcaaagcacgtgcaaagcttaatgaggttgcagcagagaaatcttcgaattctgtaccggtagttgacatgaagtctaaagctgcattgccaaaggaagatgataaatctactggcaataagataccggatgttgcagcaatctcggctttcatgacacaagtatcggaccttgttaagcttgttgattcgagagatattacggagttgcaactgaagcaatcggattgtgaacttataataagaaaaaaggaagctttgcagccaccggaacaagcacccccagttttcatgccacaatacatgcctcatcatgcaatgtttcaaaccccatttccggcagcagccccaacagcaccaccggcaccttcaaacccagcccctccaccactagcactgccctcagctgcatccccggctaaaactagcagctcatctcatcctncactcaaatgccccatggc

SEQ ID NO: 17723 - DNA, 683 bp, Gossypium hirsutum
  unsure (1)..(683): unsure at all n locations; Clone ID: LIB3831-002-Q1-K6-B5
caaaaatcaccaaaaataaaaaagaatattagtaaagggaggaaaatgatcagcggtgcagggaaaaaccgtgtgtgtaaccggagcctctggctacatcgcgtcatggcttgtgaagcagcttctacttcgtggttacactgtcaaagcctctgttcgtgacccaaatgatccaaggaagacacaacacttgcttggacttgagggtgctgagagcaggctcatgttgttaaaagcagacctattggaacaaggttcctttgatcctgtggttgaaggttgtgtaggtgttttccacactgcatctccattctatcacgatgtccttgacccagaggcagaattacttgatcccgctgtgaaaggaacactgaatgttttgagctcatgcgctaagaccccttccgttaaacgagtggtattgacatcttctatagctgcagtcgcatataacggaaaacctcgaactcccgatgttgtggttgacgagaattggtttagcgatcctgattactgtaaggacttaaagctatggtacgtagtctcaaaaacaatggnccgagattctgcctggaaattttcaaaggagaagggcattgacatggttgccataaaccctgncatggtgattggccctcttttacagncaacacttaacaccagtgctgcagcaattntaaact

SEQ ID NO: 17724 - DNA, 651 bp, Gossypium hirsutum
  unsure (1)..(651): unsure at all n locations; Clone ID: LIB3831-002-Q1-K6-B6
accggtccgaacccccggtcgcccaccgtcgggcgcgtgggctcagtcttcagtcaaaacagaaaacctccacaaaaacctgtcgttccctcctatggcggcccaacccagacgaggcggaatttccctacccgagagatcatccgcccccaaaccccattccaacattctcgccaggatcacttcttcccccattgtttcccgtgggaagcaagcggcctctgatgctgctttcgtctccaagaaactcctccgtagcaccggcaaagccgcttggatcgccggaactaccttcttgatcttatttgtccctttgatcattgagatggaccgcgagcagcagttcaatgaactcgagctccagcaagcgagtctcctcggtgccccacccactgcacctgcacgctcttgagtaaccgagtcagtgtcatatcaggtcagaggagcttgttgtttatcaaattttatggctgtcctggtttagtgaaacttctagattcagtcttacgatttttttccttttaatttgagtttaagttttttatttgtcggaatgttgttactggactttgttttatcgatagagtttattcgtatgaatttttaagtgaaactgaacattgntgtgataaagtaaaaatgggtgaaact

SEQ ID NO: 17725 - DNA, 639 bp, Gossypium hirsutum
  Clone ID: LIB3831-002-Q1-K6-B7
aagatgccaaagtgcttatcattcatatagacagggcatccacccacctcctacatttggttcgtcttctaatcttgaagctgttgctcttcaagcaagaatatatcatgttgaagatggaggaagtgctgtcaattcaacctcaggtcctttccggcccatgcacgagatcaccttttcaacaggtgaccgtccaaaactccttagtcagcttacttctttacttgcggagattggattgaacattcaagaagctcatgctttttccactacagatgggtactctttggatgtttttgttgttgatggttggccttctgaggaaattgaggagctcaaaaatgcattggagaaggaaatttcgaagtcgaagctgcaggaacaatcttattctagaaagagttcagttatgactgagcatgtcaaagaaagggttgtctccttacctagttgtgttgaaatccctactgatggaactgatgtatgggaaattgatgccaggcagctcaaaatagaaaacaggattgcatctgggtcatatgctgatctgtatagaggcacgtattgtagtcaagaagtggctattaaagtcctcaagcctgagcagatcacaagagaaatgctgagagagtttagtca

SEQ ID NO: 17726 - DNA, 650 bp, Gossypium hirsutum
  Clone ID: LIB3831-002-Q1-K6-B8
aaaaccctaccgtctctgacaaaccaaaatgactggagaaccagtgaaccccaaagcataccctttagcagatgctcaattaacgacgacgattttggatctcgttcaacaagctgctaactacaagcagctcaaaaagggagctaatgaagctactaagacacttaatagaggtatatcggagtttgttgtcatggctgccgatactgagcctcttgagattcttttgcatcttcctttgcttgctgaagataagaatgtcccatatgtatttgttccctcaaagcaagcacttggccgagcatgcggtgtcacaagacctgtaatcgcatgctccgtcacatcaaatgaaggaagccagttgaaatcgcaaatacaacagctcaaggatgccattgagaagctcctaatctaaagatattacgtaactcgtattcggtgtgatgggcctcttggaatgtggtggtcgctcctttagagactttgactgattaagtcgtgccactatcgagccgctgttttagtattcgaccttaaaaaaagtcgttgttgtgtcctattaggttttcttatgaactgaggaaaaaagataatcttgaattgatcttttagcacatcttagtatcaatgaagttttaatcgatgtttta

SEQ ID NO: 17727 - DNA, 667 bp, Gossypium hirsutum
  Clone ID: LIB3831-002-Q1-K6-B9
tcgacccagcgtccgatcctttacccacattttcttttaccacaattctcttcatattatcttctcatttgattcaatccaagttctgggtttagtttctttaacttcaaaatccattacccatattggatttattagggtcttttgttttgtttttataaaacaaatcaaatatcttgatgctcaacctttttgtgttaatgtttgagattcatgtttccaattctcagtgaaatcttattttctgggtttatgataaattccacattcatacgcaggacccatcttgttcaatctttctctgttgttttcctctactggttatattacgtttcataaagaaataatcatctttttttaacttatttatctttactactaaggtttttttttttttttaattttatttgggtcctgctattatatattataaacaaaactcctataatggctacatcctcgggttcatcagcaacacaaatcaactcaggctcagaagaagcattaatggacgaaaggaaaaggaaacgaatgatatcgaacagggaatcagcaaggagatcaaggatgaggaaacaaaagcatttagatgatctaatgactcagttgactcagttgcagaaacaaaacctgagatcatcacaaacataaacttcaccacacaaca

SEQ ID NO: 17728 - DNA, 716 bp, Gossypium hirsutum
  unsure (1)..(716): unsure at all n locations; Clone ID: LIB3831-002-Q1-K6-C10
tttgctaataaacttaaggaggcagagcaggttctcgatgttctagttgatgattattccagttatcggaagccgaaagtttgaaattggaggataatggtgtgaaggatgctgctgctgctgatggtgattcttgtaccactacagttgcatctcgtttgaatttgtcagatattttgtggtatgcacatcggattagttacactacttttgcacctcctgagtttggcgccggacaagcaccgcttcgtggggcgctcccccctgcaccacaggaggagcagatgcgtgcttctcagctttataactttgctgatctcgatgttggtttacctaagacagccgagactaaggagaaaactgtcgaagctatcattgagccaccgcctgcacagcctgcagataccaatccgctggctaatttggctgcccttcagggcttgcttccaccaaattttacagttccagcaggctggaaacccaatatgcctgtggagttgccagccaacttgccagtgccaccaccaggatggaagncctgggacccagtgccactacctncattggactccttgtctatacctaggatggaagggccgaacatgcgngcctgtccacctnncagtttgcataagccacctgagccaattcaggtgcgacatggtgagctcgacattcttgatccagagatgatagcagtgatatagtagtgatga

SEQ ID NO: 17729 - DNA, 687 bp, Gossypium hirsutum
  unsure (1)..(687): unsure at all n locations; Clone ID: LIB3831-002-Q1-K6-C11
gggaacgttagatttaccaggnaaaccggtccagaggaagcgagtcgggtcggagcagcgggtttcgaagagatctggctccgtcgatgacttgaaggcggtggcgaacaatttcaagatggagaaggttacgattttgaggcgtggagagtcgttggattcgaagatcaagagcaacagcgggggtggaaaggaagacgggttggttgtcacgggtacggatcggttaggtccagatccagaaatggtttcgaaacagatcagatttgtggatatcaagtctccggtgacaggaaaatccgacgtgtacgctggatcggctttcgctgcctctccggaaccgagttctcttcctttgccttctttctcgaagaagaagcatgttccgatcgatgattcggccactagagatctcaggcgtatactccgacttgatatctgagatctgaatatgttcacccgagtagatatattcggatccagaataagatcgtttcgtctctatttagaactctccggtagtttcaagatccgattacctccgtaatattttttaaaaaacggagggcagatttgaaaatgggagataacattaggggcgattagggaaatattccatgttgatgttgttatgggtagtacggagctaaaaatctgtgttttaattatggggatgattatgaaaat

SEQ ID NO: 17730 - DNA, 650 bp, Gossypium hirsutum
  Clone ID: LIB3831-002-Q1-K6-C12
tgcttggtagctagcactaatagaggctgtaaggctattcatttgtctggtggagctacaagtgttttattgagagatgggatgactagagctcctgttgtgaggttcgataccgcaaaagggcggctgatctgaagttgtatttggaagatcctgaaaatttcgagaccttggcttgtgtttttaacagatcaagcagatttgctaggcttcaaagcatcaaatgtgcaattgcagggaagaatctgtatttaagattctcatgctttactggtgatgctatggggatgaacatggtttccaagggagttcaaaacgttttagatttccttcaaaccgatttccctgacatggatgtcattggcatctcgggaaacttctgttccgacaaaaagccagcttcagtaaattggattgaaggccgaggcaaatctgtcgtctgtgaggccatcattaatggtgatgtagtgaggaaggtcttgaagacaagtgtagaatctctcgtggagcttaacatgcttaagaaccttactggttctgccatggctggagctctgggtggatttaatgctcatgccagtaacattgtcactgctgtctatatagctactggccaagatcctgcccaaaatgtcgagagctctcattgc

SEQ ID NO: 17731 - DNA, 629 bp, Gossypium hirsutum
  unsure (1)..(629): unsure at all n locations; Clone ID: LIB3831-002-Q1-K6-C2
ggatgttgctcatgaaatctccaaanagttgcaaggcaagccangatctgatcatcggaaactacagcgacggcaatatcgtcgcctccttgctcgcacataaattaggtgtcacacagtgcaccatcgcccatgctttggagaagacaaaatatccagattcagatatctattggaagaagcttgaagacaaataccatttctcttgccaatttacagctgatctttttgcaatgaaccatacagatttcatcatcaccagtactttccaggaaattgcaggaagcaaggacactgttggtcaatacgagagccacactgctttcactcttcctggtctctaccgtgttgtacatggtatcgatgtgtttgatcccaaattcaacattgtttcccctggtgctgatatggagatatacttcccttacaccgaagagaagcggaggttgaagcatttccatcctgagatcgaagaccttctttacagcaaagttgagaatgaagaacacttatgtgtgctcaatgaccgcaacaagccaattctgttcacaatggcaaggcttgatcgtgtcaagaacttaaccggactcgtcgagtggtacggcaagaacgcanagntgcgtgagttg

SEQ ID NO: 17732 - DNA, 641 bp, Gossypium hirsutum
  Clone ID: LIB3831-002-Q1-K6-C3
actccctacccctttctgttaaagtctctcacgttcactctacagtaaagggaatatctcatttccttgtaaaaaaatgcagcttcactcggccgtggcattgatttgtgccactgtttctctttttgtcattgccggagctgaagatccctacagattcttcaactggaatgtcacttatggtgacattttccctctcggcgttcatcaaacgggtattctcatcaatgggcaattcccaggccctgatatccactctgttaccaatgacaacctcattatcaacgtctttaacagcttaaacgagcctttcctcctttcctggaatggagtccaaaacaggaggaattcatatgaagatggtgtatacggaacaacatgccctatccctccaggaaagaacttcacatacattctgcaggtgaaggatcaaataggaagcttctattacttcccctctcttgggttccataaggctgctggtggttttggagggattagaatccttagccgaccacggatcccggttcccttcccagatcctgctggagatacactgttcttattggagattggtataaggccaatcacacggatttgagagctcaactggatagtggtaggaagctacctttccctga

SEQ ID NO: 17733 - DNA, 660 bp, Gossypium hirsutum
  Clone ID: LIB3831-002-Q1-K6-C4
atctgcaggagaaaaccagaagcaggagaagagatgactcaagacgaggtctgcaaattttattcgatgatgagcagcataaagatgatgaggaggaaaggataattgacaagctgttgatacattacagtaagaaaccgccatctggtgaagagggaaagataagaagaaagtctaaaagtcgtcatgcacatcctatgggaagtgatgtgggtgaagctcctcagaaatcaagtagggatacatccgatgatatgtccgagaccatttcccgtccagcccgatcaatatctctccctcctgcacaaacagctgaatcaaaaggaaccaaagtttatgctcgtgctagctcattcgagtctgataggtcgagtgcagcccagcatgtgcatccaaaattaccagattatgatgatttggccgctcactttgcagcaatgaaagggagataaagctttggaccttactgtgtcatttttttctccgatcactattgcattgcttctatcttaaaacttcatttatttgcttagctgagttggcgctgctgctgtcttctagtacccctgcctgcatattgttggtccatcgcttgccattgctattgcttggtagtttgagcatattttcttctgtgtttatagcacttttattactact

SEQ ID NO: 17734 - DNA, 657 bp, Gossypium hirsutum
  Clone ID: LIB3831-002-Q1-K6-C5
cggacgcgtgggaaaaagttgggagtatttagcagtgcgatagtgtctccgccggacgagctggtggcggccggttgccgaactccatcacctaagataacggcggatgctctggtgaaacggttccttgagacgaactcctccggcgtgtccatgcagatcggagaccatgtccaattcgcttattctcaccataaagagtctcctttacggcccagatcatttgctgtgaaagatgaaatcttctgcttgtttgagggagcccttgataacttggggagtttaaagcagcaatatggtctggcaaagtcggcaaatgaagtgattttggtcattgaagcttacaaggcccttcgtgaccgagcaccttatcctccaaaccatgtggttggccatctaattgggagctttgctttcattgtctttgacaaatccacctccactttgtttgtggcttctgatcaatttggtaaggttcctctctattggggaatcaccgccgacggatatgtggcctttgctgataatgctgaattgctgaaaggtgcctgtggcaaatctcttgcttcttttcctcaaggctgtttctactccacagcagtaggaggattaagaagctatgagaatcctaaagaacagatcactgcagtgcctgct

SEQ ID NO: 17735 - DNA, 675 bp, Gossypium hirsutum
  Clone ID: LIB3831-002-Q1-K6-C6
gacgctgtttccataactgatcatcctttcaagaaaagcactgcttttcttcttggtaatgagggaacagggctttcagctaaggaatgtgagatatgtgatttctttgtttacattcctcaatatggaggtggcactgcctctttgaatgtcactgttgctgcttccattgttttgcatcattttggagtttgggcaggtttttcagagagaatccgcgatgggaacaagtttgttgtggctgagaaacctttaaaacaggtgagccgaaaatactgcacagaaacagatgatcgtatcattgaggagcgaaaatcaagaggggaaagtgcttccaatggattctttgaggatggaaaaaatggtgtatcttcttccaaccttttggattcattgttccctgatgagtgattgaaggatttaaatatagatttgatcctgcaaaccatacaacgttcaccactaaacattaaaggtaatttggttcaatggtccaacctattgaaaattgttgttaacatgtggcaaacagattctagctaaccatggaccaaagtgaagtttgattattgaaggaagttcctctgtgaatccatggaaaagttgcaaagggaccccttttcagagtgacaataattgaattttgtgttacttaatttgcgtggttaaagcatc

SEQ ID NO: 17736 - DNA, 404 bp, Gossypium hirsutum
  Clone ID: LIB3831-002-Q1-K6-C7
cggacgcgtgggtcagttgatacccttatagaggagtgcctcacgacagagccacgcaatgaatacattcaaagctgtgacattgttgcattcaacaagatttagaggacacagtttttttccacggctgttgagagtgccattggccatgttatcaccttttgccccttgctttcccctggaatatatatatttttgcttgaactgtgctttgctagtgcttctgctctatagtgagcatagatgaaagggattttcaagtatttaatgatgttctatgttttgatttagttaaagcttgcccaaagtagttttagtgacattgcagattgcataagcggaaatggaagtcatgactgttttgaatgttatattaaatgatttgatgcaagttttagcaactt

SEQ ID NO: 17737 - DNA, 669 bp, Gossypium hirsutum
  unsure (1)..(669): unsure at all n locations; Clone ID: LIB3831-002-Q1-K6-C8
nggtgtgaaacatggcgtcctcgggtcttattggcaagctcgagactgatgtcgagatcgatatttctcccgaaaagttccaccatatgtggtgccacaggccgcaccatgtccaccacactagctctgaaaaagtacaaggatgcgatttacatgaaggtgaatttggaactcccggcgtcgttatctgctggagatatgtgcatgatggaaaggctaaaactgcaaagcaggtagttgaagttatgganccatgagaaaaagtcaataactttcaaaatgcttgaaggagatctgatggaggaatacaaaagcttcgtgattacaatccaaacttcccccaagagcgacggtaaaggcagtatagtgcactggactctggattatgaaaagctgcacgagggtattggacatcccgagtctctgctccagttctttatcgaactcacagcggacatggctgctcatctccgcaaggaaacttaattaatggatagaccatggcaagaaaatcccatgtcgaatcgtctgctattactattactatcagtactgatctaagaataaaactggcagctttgtactgtgttttcatttgaatatttgtatgctaggtttgattatgctgttatgagtgggggagcgcagcgttctgtttttatgtaatga

SEQ ID NO: 17738 - DNA, 688 bp, Gossypium hirsutum
  Clone ID: LIB3831-002-Q1-K6-C9
gtttattgtccccataccgcacgttaagcaagtgaagttgtcaaattctggagggcgacttattattgcttcagatggtatttgggatgctttgtcttcagacatggctgctaagtcttgtcgggggttaccggcagagcttgcagcaaagctggttgttaaggaagctttgaggtcaaggggcctgaaggatgatacaacgtgcctggttgttgatattattccttctgaccagcctgtcctaccttcaacacctatgaagaagcagaatgcgcttagttcttttctttttgggaagcgatctcaaacttctacaaataaaactacgaataaactctctgctgttggagttgttgaagagctatttgaggagggttctgccatgctcgctgaaaggttgggtaaggattttcccatgaatacaaactcaggactcttcaaatgcgcggtctgtcaagtcgatcaacctccagctgagggtttaacagtgaactccgggccatttttctcacctgcttcaaagccatgggaaggacctttcctctgcaccaactgtcggaaaaagaagacgctatggaaggaaaaagtcaggcagacccacgtgctcgctaatatcatgttatgtaacaaataaatatgcaattgtttttttttcgtggcagtgcgaatatgctttgtttcccattac

SEQ ID NO: 17739 - DNA, 594 bp, Gossypium hirsutum
  unsure (1)..(594): unsure at all n locations; Clone ID: LIB3831-002-Q1-K6-D1
cngaaagttagggttttcgctccttacgattatcgagatcgtccttttgaattgaagttgggaaagaggaaatcaagagcaaagcctgctcctaagaagcggatggataagcttgacactgtgttcagctgccccttttgtaaccatggaaccagtgttgagtgccgccttgatatgaagaacttgattggcgaagcctcttgcagaatatgccaggaaagctttagcactgttataacagctttgactgaaccaatagacatatacagtgaatggattgatgaatgtgaacgtgttaacaaccttgaagaagaggacgatggggatcaggatgaaggttatgtgcctagaaaacgggtttcgacatctgaatgggactagcagtagcgatggatgttttagtacttaccaaggctgtaattatgttagttttctgtggggagtagttgtgtgcaagtatgcatatcttacagcatcttatggtatgaatagcctaaatgatccattgtatgctaagcaagagcttcgtcaaatggctatcagatactcgntttgtgttgntatgttgatttaatgcaattacgtgatcctatt

SEQ ID NO: 17740 - DNA, 670 bp, Gossypium hirsutum
  unsure (1)..(670): unsure at all n locations; Clone ID: LIB3831-002-Q1-K6-D10
ngagcattaagctctggtacactcttggtgagtgcaaatacacgatccaagatggtgatgctcatacggattgggtcagctgtgttcgtttcagcccaaataatctgcagcctaccattgtttcagcttcttgggacaagactgtgaaggtttggaacttgactaactgtaagattcgcaacacactggccggtcactccggttatgtgaacactgttgcggtttcacctgatggttcattgtgtgctagtggcggaaaagatggtgttattttgttgtgggatttggctgaaggaaagaagctttacagtcttgacgctggttctgttattcattcgctttgctttagccccaacaggtactggctttgtgctgccactgagcagagcatcaagatctgggatctggaaagtaagagtattgtggaagacttgaaggttgatctcaaagctgaggctgagaaatctgatgtcaccgacaatgcaaacaagaagaaggtgatatactgcacaagcttgaactggagtgcagatggaagcaccttatttagtggttatacagatggtgtaatcagagtttggggaattggtcgatactaagaccaacattcatgcatgcatgttgtgccttccatgagtaatctatagtattaagaacatgtagtgatact

SEQ ID NO: 17741 - DNA, 695 bp, Gossypium hirsutum
  unsure (1)..(695): unsure at all n locations; Clone ID: LIB3831-002-Q1-K6-D12
cggnaactttcatttagattccggcgatcgcatcgatcttttttttttcttttaatctttatgctacaatgaatcccgaatatgactacctgttcaagcttctgcttattggagattctggtgttggaaaatcttgtcttcttttgagatttgctgatgattcatatgtagaaagctacataagcaccattggggttgattttaaaatacgtactgtggagcaggatgggaaaaccattaaacttcaaatttgggatactgctggacaagaacggtttaggacaatcactagtagctactaccgtggtgcccatggcataataatcgtttatgatgtgacagaccaagaaagcttcaacaatgtcaagcagtggctgagtgaaattgatcgctatgctagtgataacgttaacaaactactggttggaaacaagtgtgaccttacagctaataaagttgtgtcatacgaaacagccaaggcatttgcagatgaaattggcataccttttttggaaaccagtgcaaaagatgccacaaatgttgaacaagctttcatggccatggctgcctctgtcaaagatagaatggcaagccaaccaacggcaaacaatgcaaagcctncaacagtacagatcccgagtcagcctgttgcacagcagagtggctgctgctcttcctaatgtaaggtaatgatg

SEQ ID NO: 17742 - DNA, 637 bp, Gossypium hirsutum
  unsure (1)..(637): unsure at all n locations; Clone ID: LIB3831-002-Q1-K6-D4
ctgttgcccgttggaaagaatccctcactggaacactttctcttactgctgacgacattgcaatgatcaccgatggccagtttgcgattgacttattttcccatattaaagttcttcaaatcactgaatacatcaaagattcagtagttgttccgttccatttcttccgaagattttccaatttacaaaagcttaaaatggttggttgcaattttaaagagttttctccctatgaaggtgatgttggtgaggagagagacgtggtaacgatgctcccaagaattaagaagttaacattgcaaggtgttgataatatggaacatctatggaagcaagactctcccttccatcacatttgtgcaaatcttgaaactcttaaagtttccgagtgtgacagcgtaattagtttatcatgtgcttcttcatctttccaaaatcttacaactttggatgtttggaactgcaaagagatggtagagctaattacatcttcgaaagcccaatgtttggagcagcttgttacactgaagataggaggatgtgaaatgatgagagaagaattgcaagtgatggagatgaagcacacatcatgagattattttcaaggagttgaaatatttggagctntatgatctac

SEQ ID NO: 17743 - DNA, 643 bp, Gossypium hirsutum
  Clone ID: LIB3831-002-Q1-K6-D5
cggacgcgtgggcggacgcgtgggcggacgcgtgggtgctaaacccaaaagggtcaaactgttgcagtttttggactgggtgccgttggtcttgccgccgctgaaggtgcaagggtttgtggggcttctcggatcatcgctgttgatgtgaaccccagaagatttgaagaagctaagaggtttgggattacagaatttgtgaatccaaaagactacgataagccagttcaagaggtgattgtggagatgaccggcggaggagtggatcgcagtgtggagtgtacagggagcgtccaagccatgatttccgcttttgaatgcgtccatgatggttggggtgtttgtgtgctggtgggtgtgccaaagaaagacgatgcattcaaaactcatccaatgaatctactaagtgagaggacccttaagggtgctttttatggcaactataaaccacgcactgatattcccatgtttgtcgacaaatatttgaacaaggagctggggctggatatggacaagttcatcacacactctgtgccttttgccgatattaacaaggcattcgactacatgctccagggtataggtctgagatgcatgattcatttggatgcttaagggaaatgtgctgctgtatatttgccca

SEQ ID NO: 17744 - DNA, 631 bp, Gossypium hirsutum
  unsure (1)..(631): unsure at all n locations; Clone ID: LIB3831-002-Q1-K6-D6
gagatgctgcctcagaggattcgaaacagctagcgaacgtgatgtcagcgacaacgaagaagacgaccgcgctggcgataaacagccaccccaacagagaggtcccgattcttatcaagatgccttaaacgacgagcaactgaaagagaaagctttggcacaagcaaatgatgcaaaaacagaaggaaataaattgttcggaaacggccaataccaggaggccttgttacagtatgagattgctttgcaagttacggcggagatgccttcggccactgaaattcgttccatttgccattcaaatcgggctgtttgcttgctgaagctgggtaattatgaggaaaccatcaaggaatgtaataaagctttggaacttaatgcttcttatatgaaagctcttgttagacgcggagaagctcatgaaaagcttgaacattttgaagaagctattgctgatatgaagaagatattggaattggatcctgctaatgaccaggctcggaaggccattcgtcgcttggaaccattggccgcagagaaaagagaaaagatgaaagaggagatgattggaaagctaaaagaattgggcaactctgttctgggtcgttntgggatgagtattgacaacttc

SEQ ID NO: 17745 - DNA, 511 bp, Gossypium hirsutum
  Clone ID: LIB3831-002-Q1-K6-D7
gccacgccaacggtccacccaatggtgctgagaaccctggagggcaccctaaggggttcccaatgcctccagcttcacttgcaccttatcctgaccctaatcctgacgctatgactgctcatggacctgtgcataggcaccagcggaagctcctcctcatgtacctcaacctttaactgcaggctgtggggctgggcgtgctaatggcggtgctcctatcgcacgccatcttggcacaccagcaaagcacacaaactatcatagcaactatcgaatcttctttgaacaatcctaaggagaatccatacaggcaggcatccttgggtggtccattatctgagaccgaagttcacaacactggccaaaggccgagtgaaactttccgagagggatgaataatggaaggaatgttccatgactacttgagagatgactgctaaagtcaacgctaacatatccctgataacattacagatgcttctacacaggcttatgatagtggatacgctgc

SEQ ID NO: 17746 - DNA, 628 bp, Gossypium hirsutum
  Clone ID: LIB3831-002-Q1-K6-D8
gttcattctcgtagccatggtggaggatttgctgttcagactgagccttgcatgggccgttctgttagcgtacatggatgctctgaggcagcgaatccaccatcgtctcaagatgcagaagaaaaccttgatgtcgtcaaggatgcagccactgatatttctcaaacggtttcaagaagagacatggcgacccaaatgagcccacagagtagcacccactcgtctcccaaaggaaggccttccttctctccctcttccccttcagctctacctatcatggaactgcagagcatccatggctctaaatcagtactgagagatgtgccagtagatgaaagagtgaccctgactaggtggtcgaagaagcatagagctcgaaacactgggaagagctcagaaattgttgatgattggagaaagaaagttgtagatacttgtacatcaacatgggatgttacagagacaggaaagagcatttccaagatgaaaagagaagaagccaaaatcactgcctgggaaaatctgcagaaggctaaagccgaggcagccataaggaaactagagatgaagctggaaaagaagagatcgtcatcaatggataaaataatgaataaactaagatcagctc

SEQ ID NO: 17747 - DNA, 656 bp, Gossypium hirsutum
  Clone ID: LIB3831-002-Q1-K6-D9
gtttctttctgggtgaaattcagtgttctttgccgtctttttctgaatgggttgtttgattaaggagttcctcctattacatgcatggtgttggttgacatgctgaactccttttaagggtctatttaaagattgggatttgattaaagtatgaaaagctttgacccttttagcttttgtcgacattcttgtatcctggtgttcctttctttctgggtgtttgattgttatcttgaattctagaagctcaaggttagtcaatctcgagttgtttcgacagataaacaaaatggctttgaagaaaaacgggttcattccaagttctgcacctgaagaactgaagaaggttttggtagcagtggcgtcggtttggggagatacgatagaagatatggaagaatttcatgtatttccactcaagggagctatgactaacgaggtttttcagataaactggcctacaaatcatggtgatctgcatcagaaagtgttggtccgggtttatggcaaaggtgtggaagtgtttttcaatagggatgatgagattaggacttttgagtgcatgtccgagctaggtcaaggacctaggcttcttgggcggttttcagatggaaaggattgagagttcattcatgccaggacactctctgttgctg

SEQ ID NO: 17748 - DNA, 285 bp, Gossypium hirsutum
  Clone ID: LIB3831-002-Q1-K6-E1
aagtagagaaaccataatcaccacgtatgcattaaagtagaaaaacaactgcaatgaaacttgaaacattcaagtacttgggtaataaaactgaaacaacccttcttcacacaaaaatatgctccgtacaattcgtttattctctcataacatctcttctaaattaaaattgctaaagcttggatacaccaagcacaatcactcactcacttaagccttagacatgtgtcggatcaagtcgataacacgggaactgtaaccccattcgttgtcataccaaggcga

SEQ ID NO: 17749 - DNA, 639 bp, Gossypium hirsutum
  unsure (1)..(639): unsure at all n locations; Clone ID: LIB3831-002-Q1-K6-E10
gatcggttgtcgcaaaagttccgaacgaggtgcagttgcagctttacggtttgtacaaggttgccaccgaagggccttgcactgctccccagccttccgctttgaaaatgacggctcgtgctaagtggcaagcatggcacaaattgggtgctatgcctccagaggatgcaatgcagaaatacattgatgttgtgacagagctatatccatcttgggctgctggttcagctatgggcaaaggtggggctgataatgcttcaagtaaagatgtcaaaggaccaatgggaccggttttcagctcttttgtgtatgaagaggaatctgaaaatgatttgaaaatggatgctatccacacttttgccagagaaggagaactggataatttgcttaaatgcattgaaagtggtgtttctgtgcatttgcaagacagtgaaggcaggaccccgatgcattgggctgtagatcgtggccatcttaaaattgccgaagcacttcttagcaggaatgctgatgtgaatgctaaggacaatgaaggtcaaaccccattgcactatgctgttatgtgtgagagggaagacattgccaaattacttgtaaaacaaaatgcagacanagatacgaaggataacgacggcaact

SEQ ID NO: 17750 - DNA, 654 bp, Gossypium hirsutum
  unsure (1)..(654): unsure at all n locations; Clone ID: LIB3831-002-Q1-K6-E11
ctttcgtcccgataactttgtcttcggtcagtctggtgctggcaacaactgggccaagggtcattataccgagggagctgagctcattgattctgttctagacgttgtcagaaaagaggcggagaattgtgattgtttgcagggttttcaagtttgtcattcattgggtggcggtactggatctggaatgggaacccttcttatttccaagatcagggaggagtatccagatcgcatgatgttgacattttcggtcttcccttcgcccaaggtatccgatacagttgttgaaccatacaatgctaccctttctgttcatcagcttgttgagaatgctgatgaatgcatggtgttggacaatgaagctctttatgacatctgcttccgcaccctcaagctcgccactcctacctttggtgaccttaaccacctcatctctgctaccatgagtggtgttacatgctgtctacggttccctggacagctgaactctgatctccgtaagctggcggttaaccttatccctttccctcgattacacttcttcatggttggctntgcacccttgacatccagaggatcacagcagtataggaacctgactgttnctgaactgactcagcagatgtgggatgccaaaacatgatgtgtgct

SEQ ID NO: 17751 - DNA, 635 bp, Gossypium hirsutum
  Clone ID: LIB3831-002-Q1-K6-E12
gttttcttatgcagaaggaactcgattatcttgttggagctgtggcaaatcccaagaagccatttgctgcaattgtcggtggttctaaggtatcaaccaagattggagtgattgaatcactcttggccaaggttgatattctcatactgggtggaggaatgatttataccttctacaaggcccaaggacatgcagttggatcttcacttgtggaagaagacaaacttgatctagcaacatcactccttgagaaggccaaggcaaaaggagtctctctcttgctcccctctgatgtggttgttgctgacaagtttgctgctgatgctaacagcaaggtggtgccagcatcagggatcccagatggttggatgggcttggatattggacctgactccatcaaaaccttcagtgaatctttggacactacccagaccattatctggaatggaccaatgggtgtgtttgagtttgagaagtttgctgccggcactgaggcggttgccaagaagcttgcggaactcagtgggaagggagtgacaacaattatcggaggaggtgactctgttgcagctgtggaaaaaagctggcttgctgacaagatgagccacatctctactggtggtggtgccagcttg

SEQ ID NO: 17752 - DNA, 650 bp, Gossypium hirsutum
  Clone ID: LIB3831-002-Q1-K6-E2
gattggtgaacaagtttccaagcaagctactattgctggaatgctttggaatggggaatcacctcaagctaaagaagttgcggagaacgtgaattcatatttcaatgtgttgcagggcttccttttgctttcccatggaagtactgttggtgctggcccaactctctcctcaagtatccatgaatccgtgaagcacgttgttgattgcagttttaggttaatgaaggaagatgtctcgttatatggatctcacaataaggagaaaaaactatcgatgcctcagattgttggagcagtatgggaggcatgttctgctcttaagaaggtccctcccacaaatgtaacagcgatcgggcgagcaatgacgcaagtagcagtttccatgaaggatgtacttcgtgagataaatgagctcaagcctgcttcctccaaccctggggatgaaacctgtgataacactcctagcaaaacagaaagcaagcctgaaaatgatgacatgagtgatgatgatctaggcagcgacttgtcacctgaagaaatgaaagtagctcaactagctcatggggttgtgtctgagacacttgtggttataaaggaaactatccgcacaatcaccggtatgcttaaacttgaaaccccaatgacaatgt

SEQ ID NO: 17753 - DNA, 662 bp, Gossypium hirsutum
  unsure (1)..(662): unsure at all n locations; Clone ID: LIB3831-002-Q1-K6-E3
cggacgcgtgggcaaagatcgaggatgatctcaaggttcgtgttgctgagtataacaatgtgcgcggccaacttaatgccataaacagaaagcaaagtggaagcttggctgttcgtgacctgtctaatatagtgaagcctgaggatatcattacttctgaacacctagtgactctcctcgcagttattcccaagtattcacagaaggattggctttcaagctacgaaacattgactacctatgtggtccctaggtcctccaagaagttgtatgaagataatgaatatgctctttacactgtcacgttatttggtcgcgtcgctgacaatttcagaactagtgcacgggaacgaggcttccaaattcgtgattttgaatatagtccagaagcacaagaaagtcgtaagcaggaactagagaaattggtacaagaccaagatagcttgcgaagctcacttttgcaatggtgttacactagttatggnggaggttttcaactcctggatgcatttttgtgctttacgtatctttgcagagagcattctaagatatggtctgccgccgtctttcctggcatgcgttttgtccccatctacaaagggtgagaagaaagtgcngtccatccttgaagagttatgtgatagcacaaacagcacatactg

SEQ ID NO: 17754 - DNA, 658 bp, Gossypium hirsutum
  unsure (1)..(658): unsure at all n locations; Clone ID: LIB3831-002-Q1-K6-E4
aatctctccaatctccaccgctacttccgccacttcggccaccgccgcgaatttccgatttataatgtgtttgtattaattgttacctgttacgatttgtgaataattgagttagggttttcgatttatcttgatttatttgtaaaggaaaagggaaaaaggaaaagaaaataaaagatggacaagtacgagctggtgaaagacataggatctgggaacttcggcgtagcgaggttgatgcgtaacaaagaaaccaaagaactcgtcgccatgaagtatatcgaccgtggacaaaagattgatgagaatgtggcaagggagattataaatcatagatcactacgtcatccgaatataattcggttcaaagaggtggttttgactcctacacatcttgcaattgtgatggagtatgcagctggtggtgaactctttgagcgaatttgcaacgctggacgattcagcgaggatgaggctaggtatttttttcagcagttgatctcaggagttagctactgtcatgccatgcaaatatgccatcgagatctgaagttagagaataccctgttggatgggagccctgctcctcgtctgaaaatctgtgattntggttattcaaagtcatctctactgcattcaagacccagtcaactgttgg

SEQ ID NO: 17755 - DNA, 694 bp, Gossypium hirsutum
  unsure (1)..(694): unsure at all n locations; Clone ID: LIB3831-002-Q1-K6-E5
gttttgagtaatatgatgattttactggttttcatagtttgagagttggataggcaatgtttgataacttagaattgctttgaggttcccgaaacaccgatatcttgataatttgtgtcggtttaattggtttcttgatatatgttcggtcctccgagactgagatccatgaatacggccgattccgaggcaaggcctgtattgggaccggcggggaataagacaggttctttgcgtgcaagaaaaccaggttcaaagccttcgaggaagattgaaaagtgttcagctgaggccactttagcagaggagaaaaatggccttccatcatccaaagttaattcccattctgttagtgttgttccttcagtgctacgccgccatgaacagttactacattctaacttaacgttaaacgcttcatgttcgtctgatgcttccacggattcatttcacagtcgagcatctactggtaggttaatttggtctaatagtgtaggaactaggaggaagccattcccatcaactccgacaagtgttgtttcggatggcgggttggattcactgcctggtgattcacataggaggaagagatgcgcgtgggtgacaccaaatacagatccgagttatgttgctttccatgatgaagagtggggagttcccgtacatgatgatnaaaaactgttcgagctactcg

SEQ ID NO: 17756 - DNA, 634 bp, Gossypium hirsutum
  Clone ID: LIB3831-002-Q1-K6-E6
cggacgcgtgggcggacgcgtgggtttgaatcaacctttgctaagcctaaagaagctttactcttctcagttgggatttgcaagatggagagaacgaataacttttggcagttgggagatgatcttcggggactatcaaaagtcgcagaggatcacaaatggttgatggctgcatcgaaactggctgaacagacgaggacaaagggtgaacgcatgaacaatctagatctttccaagggtccagctgaaatgaggacaagggataaattcgggttccaggaagacagcaagcttgagaaccttaactttaatgtgttgaacttggactctaaggttggggataatgtaagcaaaagttccttccaaaatggtatgtacaatatgaatgctgtttaccagaaaaataacagtattagccttggaaacctgactggcaacaaatatatgagcaacaatcagagcaacaaagatgtcaacaataacagcagcaccaagaataacaacaatggcaatgagaacagtaatgcaaacaacgccgttgacaaaagattcaagactttgcctgcaactgagacactcccgagaaatgaggtgcttggagggtacatctttgtttgtaaccatgatacgatgc

SEQ ID NO: 17757 - DNA, 606 bp, Gossypium hirsutum
  unsure (1)..(606): unsure at all n locations; Clone ID: LIB3831-002-Q1-K6-E7
atcaaaccagcgactcaggagtggtgaacgttttgaaagcttgtgccaaagcaaaacagttaaacgagtcgtcttgacatcatctgccgcagctgtgtctatcaacacactggatgggacagatctcgtcatgacagagaaagactggaccgatatcgagttcttatcatcagcaaagccaccaacttgggggtaccctgcatccaagacgttggctgaaaaggcagcttggaaatttgctgaagaaaacaacattgatctcattacagttatcccttctctcatgactggtccttcccttaccccaattgtccccagcagcataggccttgctacatctttgatttcaggcaatgaattcctcataaatgctttgaaaggaatgcagatgctgtcaggttcgatctctatcacacatgtggaagacgaatgccgagcccatgtttttctggctgaaaaagaatctgcatcgggtcgatatatatgcagtgctgtcaataccagtgtgccagaactagcaaagttcctcaacaaaagataccctgacttcaaagtccctaccgattntggagatttcccctccaaacccaagttgatcatttcctc

SEQ ID NO: 17758 - DNA, 624 bp, Gossypium hirsutum
  unsure (1)..(624): unsure at all n locations; Clone ID: LIB3831-002-Q1-K6-E8
gnacccaaatacaccaaacatgaacaacaccatctctttaactctgcttcacattgcattttgcttcactttagtttcattcactcctatttcagccctggaattgcacggaactggtgccaacatggtncgaaacaacctgccaaaagacacccttttacaatctatgcgtctcggctcttaaatccgaccctcgaagttccggtgccgacgtagcggggctagcgcaaatcggaactgataaactgaaggccaaagccaccgcaacgctgcggcagatcacagcgctgcttaaagtggccaaagatccgaagctgaaaatggccttgcgtgactgtgctgattattacaacgccattgttaaatacgatatcccggtagctgtagaagctgtcacgaaaggcgaccctaagttcggtgtcgagggggcgacggatgcagctaatgaagccgatgcttgtggcaggggattcaaaaaccaacccaagtttccaatatatgctagcaacaaggttgtccatgatctttctgctgtggttgcttccattgtccaattattactatgagtacgatgaaatgttttaactgtctaatgccaagtaatgggcaataaaanagtatgta

SEQ ID NO: 17759 - DNA, 616 bp, Gossypium hirsutum
  unsure (1)..(616): unsure at all n locations; Clone ID: LIB3831-002-Q1-K6-E9
ngaaaatctccattattttaaatccctctttgcatttcttttaacggcaatggctctctctcgtttcgtttacttaatcatgctggcattgcttttttgctccgttatagcacaatctccgacgccgtctcctgtttcttcgccgaagaaatctccgtcatctactccgacaccgatctcttgacctgctacaatatctgctccgtctccgtcggaggttccgtcagcgactacaccgtctccagcaactgttgagtcacctccatctccttctgctctgtcaccgaatgccagtcccacgtcaatttctgaacctcctgccggagctccgggaccagcggagaatagtgccgttaggtttggtgctgctggatctgttgcggttggagtgttgatggtcgctatggtactgtaggcatatccagatcttccttctctcgatgatagtataaataaaatttagcttatgtattctccttagttttattttgaaattntgttctttatataatggtaaatttatacaattacctatattactgcctatgaattatgtattatgcttgcgatttcaattactgtattcgtatataatataatagtatttatatttgtg

SEQ ID NO: 17760 - DNA, 675 bp, Gossypium hirsutum
  Clone ID: LIB3831-002-Q1-K6-F1
caaaaaattggaggagtttccaggcacttggagacattgcttttgcctattcatactcccttatactcattgaaattcaggacacccttaaggctccaccatcagaatcaaagacaatgaagaaagcaaccttgataagtgttggagtgacaaccttgttttacatgttgtgtggttgcatgggctatgctgcttttggagacttgtcacctggaaaccttttaactggttttggattttataacccgttttggctccttgatattgccaatgctgccattgttattcaccttgttggtgcatatcaagtttactgtcaacctcttttcgccttcattgagaaaagcgcgaccgagcggtttccggacagtgaattcattaccaaagatatcaagatcccgatcccgggttttcgcccttacaatctcaacttgttccgattggtttggaggacaatttttgtgatcattacaacattgatctccatgcttcttcctttctttaatgacattgttggactccttggggcacttggattttggccattaacagtttatttcccagttgagatgtacatttcacaaaagaagatcctaagtggagcacaagatgggtttgtcttcaaatccttagcattgcttgtctctttatcaccattgccgcagctgccggttc

SEQ ID NO: 17761 - DNA, 469 bp, Gossypium hirsutum
  Clone ID: LIB3831-002-Q1-K6-F10
gggacttgctccggatactcagtcctccagtcaggcacagacaagtcaggctcacaccagagatacaagcaactccgagaaggatgctgcagtgacagagaaatcgaaagaatcatccagtgctagctgaatgtgaaactcaattttgttaaagcatatgcttcttaaaggttagcttgctacagtggtgcctaccatggatagttgggttcacgaatctcctaaagctaaacttccatgacacaattcaggcaaggggatagaaatatggaaggcagtcactattctttatcatgcccttgatatctaacacatgacatataatataaatgccattgatagagaaagactgtctgccttcgatttaaattatttgatttctcgagaaatttcagggaattctagtcaacatgtacaagaggattgattgcaattttgataagttgaagtattgcacataggggtttgt

SEQ ID NO: 17762 - DNA, 610 bp, Gossypium hirsutum
  unsure (1)..(610): unsure at all n locations; Clone ID: LIB3831-002-Q1-K6-F11
ngaaattgatgatattcgattggttgtgacggaacgggttggccctcaagggggatgagaatgagatcggtgctagtgccgaaaacgccgccgcttataacgggaatctggtccgtcggatcttgaccggcggtgggacccctttgagacccaaagcagatcttaccgtttatctgtttgccctttttaatgaaaacaacaaagtcgggcctacatccgaacgaaattacggcctcttttacccgacagaggaaaaagtttacgatatccctttcactgtagaagggttgaagaattaccatgacaggcggtcgccggaggccgggaatcaacccgtcaacggaggaaaagggggtgtgtcgaagagtacgacggggaacacgtggtgcgttgcgaacggcgaagctggaaaagagaagctgcaggcagctctagatttcgcctgcggtgaaggaggtgctgattgccattcgatccaaccaggtgccacgtgttacgatcccaacaccctggaagcccacgcttcgttcgctttcaacagttattatcaaaagaacggacgccacatggggacgtgttattttggcggggcggcctacgtcgtcaccca

SEQ ID NO: 17763 - DNA, 705 bp, Gossypium hirsutum
  Clone ID: LIB3831-002-Q1-K6-F12
aggtgtacgattctcttctaggggttcttcgacaggttcaaacaccttgggaagtgctgctactgatagtcaaagcacgggagatgaaactctaactcaatcagcagaagaagtacctggaagtccagctgaggctactaagggtactaagagaaagcgagagcctacaaacatgaaagatatatggaaccttcaacctggaactcgtatagtagtagatgccaaccaatatggccagcttattgggaaggaagcgtccaaattggctgaatttctctgtacaattgcaaggactggttctatttgtcctttgaatacaaaacattggaaacatctttctaaatatgtgttgcaaaacatattgagaatcgttcatgaaaagtttgatctccaaggtaaggtggaggactctgacattctctcacatgttggaaaactccgaagaagtttaaattgactttaaaaactagatactacaaaaagatggtccaagaaggtcgatcgattgaagaaaatacaaaaacaatcctcctggtgtgcaagatgatcaatggaagtggctagcggagtgatggggaacatcacaagctgaggtatgcacttttattatactaaatgtcctattttttctgcttccacttaccgtatgatcaaagtaggggtgcataaattgcgtgatttgtgaatgaagcataataaactaac

SEQ ID NO: 17764 - DNA, 684 bp, Gossypium hirsutum
  unsure (1)..(684): unsure at all n locations; Clone ID: LIB3831-002-Q1-K6-F2
ggcgtcctcggatcttattggcaagctcgagactgatgtcgagatcgatatttctcccgaaaagttccaccatatgtggtgccacaggccgcaccatgtccaccacactagctctgaaaaagtacaaggatgcgatttacatgaaggtgaatttggaactcccggcgtcgttatctgctggagatatgtgcatgatggaaaggctaaaactgcaaagcaggtagttgaagttatggaccatgagaaaaagtcaataactttcaaaatgcttgaaggagatctgatggaggaatacaaaagcttcgtgattacaatccaaacttcccccaagagcgacggtaaaggcagtatagtgcactggactctggattatgaaaagctgcacgagggtattggacatcccgagtctctgctccagttctttatcgaactcacagcggacatggctgctcatctccgcaaggaaacttaattaatggatagaccatggcaagaaaatcccatgtcgaatcgtctgctattactattactatcagtactgatctaagaataaaactggcagctntgtgctgtgttttcatttgaatatttgtatgctaggtttgattatgctngtatgagtgggggagcgcagcgttctgtttttatgtattgaattaaatctactatgtgcttttatttgag

SEQ ID NO: 17765 - DNA, 627 bp, Gossypium hirsutum
  Clone ID: LIB3831-002-Q1-K6-F3
atctttctctttcgattttagttttgatcgccatttttggttcttgttggtctcgcgaggtggttagtgacaatgatgatggtggtctgtatccgttcattgggactaacagggaaacgttagagatcattatcggcggcggcggcggtgaagctcctgctccgtcgcctgaagattgtcctcctccgccacctgaacctgaatgtccacctccagcatctccaccaccaccaccaccaccaccaccaccaccaccaccaccacaaatacgaaaaccaaaaccaaaaccaaaaccaaaaccaaaaccaaaaccaacaccaaaaccaccgccaaaaccaccgccaagaccaccgtcgaaatgtggttaccggagcagcaacctctgcttcgaaaacgaactgctcgcaacatcttatggagtaatccaaaagttcaagaagctaatcaaaccagacgaaaatggcaaaagatacacaaaaacatggaacggtcccaacgtttgcaaatacaaaggcttcaattgtgatgtgcgaccggacgtgaaaaaaaaacagtcgccgccgtcgatttcaacggcgctaagctctccggcatcaatggttcccttccactccacgatttcatcga

SEQ ID NO: 17766 - DNA, 680 bp, Gossypium hirsutum
  Clone ID: LIB3831-002-Q1-K6-F4
cgcaaagatagattccaacccatctctataaaatctactccaatcatcatttttgtctcacataagtcattatgtcctgaacggccacagaaaaacataacagcgttagacgttcatacttaaacttgacatatgaacatactctgtttgacataacttgcttctttcttcttaatggcttgctaacgtcaatctgcactctctcatataattgcgattttccttgcccagaattgaaccatcatactctaagaaagctccaataaagttccccctagcttcactagattctcagagaataaaccaattggaacatcgtggatttgtacccaaaacgaaacataaactaaaggtattttaagcggatcttcacctcttttcaatttgctcagaattaataaatgattgttaaacgtccacggaagaccctttaaaactctccatatccatgctatgaaaaaacttgaaaagatacattttctcccccaaatcttggatctgtaccccacagatggaatgccataaatttgctaaagtactcattatagccgaaaaataacgatactagctgttaagaaacaccccacaagctggtaatctcccacaactgtttgcgtccttgaatcacctggatctgtaaaaatttttcttcttcttcatttttggtaactgtgctaatt

SEQ ID NO: 17767 - DNA, 679 bp, Gossypium hirsutum
  Clone ID: LIB3831-002-Q1-K6-F5
aagtactttgctcctggagaaagttaacatgtgtgagaggaacagtgtcagtgaagaaatttctgggctgtatttataagttacaggtgatttggccttgaatctgcaagttttgatatagttgtagtgaatttctatttgcgatatatgcatggaaacaaattcaggtgttacagtgataggagctgaagctccttcaacttatcatatggcgccgaggactgaaaatgctaaccagatcagcagtggtttaacaccagtcgatggtttaacaccagtcgatgttccggcagttagtgtaggattaactggtagtacagaaaagaagaagagaggtagacctagaaaatatggaccagatgggaaaatggcaagggcattgtcaccaatgcctatttcctcatctgtcccacccggtacagctgagtttccaagtggaggaaagccagggagagggcgaggcagtgcttaccagattaagcatcataaaggaatggacatagataatttaggtgagttggccggcacttctattggaacaaattttatgccgcatgtcatcactgtcaatcccggcgaggatgtaacaatgaaggtgatatcgttttctcaacaaggaccacgagccatttgcattctatccgctaacggagtgatttcaaatgttacacttcgtcag

SEQ ID NO: 17768 - DNA, 664 bp, Gossypium hirsutum
  Clone ID: LIB3831-002-Q1-K6-F6
attatcttctttctcttctcttaccatgggatccttacaagtttcgtccttctagttcctttgattccccgttctggactaccaattctggtgctccagtttggaacaataactcatcacttactgtgggagcaagaggtccaattctccttgaagactatcatttggtggagaagctagctgatttcgacagagaacgcatacctgaacgtgttgttcatgctagaggagccagtgcgaaagggttctttgaggtcactcatgatatatctcagctcacatgtgctgatttccttcgtgcccctggagtgcagaccccgctcattgttagattctccacggttattcatgaacgtggtagtcctgaaactttgagagacccccgaggtttcgctgtgaaattttacactcgagagggaaattttgatctcgtggggaacaatttccctgtgtttttcatccgtgacggaatgaagttccctgatatggtccatgctcttaaaccaaacccgaagtcccacattcaggaaaactggaggattctggacttcttttcgcaccatcccgaaagcttgcacatgttcaccttcctgtttgatgacatcggtgttccacaggattataggcacatggatggctctggtgttcatacctacacactaat

SEQ ID NO: 17769 - DNA, 646 bp, Gossypium hirsutum
  unsure (1)..(646): unsure at all n locations; Clone ID: LIB3831-002-Q1-K6-F8
ggtagggctcaggcacttcaggcagngctggaacgggtccggagagccgattctcgatacagataacggtgaggagcttgttcacgtccaaccttccgtctccgttgcagtcggtgaccgtgccccagaatccccgggcactctctacataaccaccaggcaagtgatttggctgagtgaattggacagagaaaagggctacgccgtttatttcctgtctctgtcgctgcacgccgtttcaagggaccccgaggcttacccttctccctgtatttacactcagattgaaactgaagctgatgaagttgaagatgagtctgaggactcggattctgaatgtagcgaggttttagatttgtccaagatcagagagataaggtttattccttcagatgctaaccaattggatactctttttcaagtattctgtgagtgcgctgaactaaatccggagcctattgaagaaggagaagaagagggacataattggatttttagtgctgatcagttggaagatgaagctggagctggtgatgatgtggaatggcatttctcccagaatccaacaaacacaatcggtcattcaaatggtcaccatgacctagctagcagtgttcttgagcttaaatcaatgatcaacgctttg

SEQ ID NO: 17770 - DNA, 623 bp, Gossypium hirsutum
  Clone ID: LIB3831-002-Q1-K6-F9
cggacgcgtgggcaaaacaaagctgtaatccaagcttctattcagttttgtaagagctatggctaaggacattgaggttggtggtgagttccaggccaaggactaccatgatcctccacccgctccattggtcgacgctcaggagttagccaagtggtctttttacagggctgtcatagctgagttcattgccactctcctctttctctacatcactgtcttgactgtgatcggttacaagacccagaccgaccctgctaagggcggtgaagattgtggcggcgttggcattctcggcattgcttgggcttttggtggcatgatctttatccttgtttactgcactgccggtatctctgggggacacatcaacccagcagtaacctttggacttttcttggctaggaaggtgtcgttggttcgagccatattttacatgggtgctcagtgtttgggagccatatgtgggtgtgggctggtcaaggccttccaaaactcgtactacaaccagtatggaggaggagccaacagcctggctgaaggatacagcactggaactggtttggcggctgaaatatcggcacctttgtccttgtctacactgttttctctgcaactgatcc

SEQ ID NO: 17771 - DNA, 618 bp, Gossypium hirsutum
  Clone ID: LIB3831-002-Q1-K6-G1
tctccttccactttgtatgctattgcttgtgttcttgaaaatgttcctttcatcaatggcagcccacaaaacacctttgttccagggttgattgatttggctattcaaaggaactgtctgattggaggagatgacttcaagagtggccagaccaagatgaaatctgtcctcgtggatttccttgttggggctggtatcaagccaacatcgatagtgagttacaaccatctgggaaataatgatggcatgaatctgtcagcaccccaaaccttccgttccaaggagatctcaaagagcaatgttgttgatgacatggtttcaagcaatggaatcctctatgagcctggtgaacatcctgatcatgttgtggtcatcaagtatgtgccgtatgtgggagacagcaagagagccatggatgagtacacatcagagatattcatgggaggcaagaacaccattgtgttgcacaacacatgtgaggattccctgttggctgctcccattatcctagatttggttctccttgctgaacttagcaccaggatccagttcaaggctgatggagagggcaagttccacactttccatcctgtggctacaatcctcagttacctcacc

SEQ ID NO: 17772 - DNA, 699 bp, Gossypium hirsutum
  unsure (1)..(699): unsure at all n locations; Clone ID: LIB3831-002-Q1-K6-G10
actgtagctctacttaacctatattcatcaaaagaggggaagagttggaattcaagagcttagcctttctcatagttcaattccttgccagctttgaaccatggagttccctaatctagacccagaaagctcttcccagaaaaaaatgggaagaggcaaaatcgagattaagcggatcgagaacaccactaatcgacaagttaccttctgcaagcgccgcaatggactgctcaaaaaggcctatgaattatctgttctttgtgatgctgaggtggctctcatagtcttctccagccgtggccgtctctatgaatatgctaacaacagtgtgagagcaacaattgagagatacaagaaagcatgctcagatgcaacaactccagggtctgtggctgaagccaacattcagttctaccagcaagaagccaccaaactccgacgacaaattcgtgatgttcagaacatgaacaggcatatccttggagaggctctgagctcattgacctttaaggaactcaagaaccttgaaggcaggctggagaaaggcatttgtagaatcagatccaaaaagaacgaattactgtttgcagaaattggattcatgcanaagagggaagttgaactgcagaacgatnacatgtacctgcgagcaaaatagctgaaatgaaagacgcacaacatcaaacagctgatgcagca

SEQ ID NO: 17773 - DNA, 638 bp, Gossypium hirsutum
  Clone ID: LIB3831-002-Q1-K6-G11
tttcgaaccagctccaccatcacccccaaaaacaaagcaaattgtagaagatggcaacacaagcacttgtatcatcgtctcttacctactcagtggagactgcaaggcagattcttggagctaaacgacaaattgggccttcaaggaaaggatcctttgttgttaaggcagcttcgactccacccgttaagcaaggagctgatagacctttatggtttgcatctaaacaaagcctttcatacttggatggcagccttccaggtgattatggatttgaccccttgggactctcagaccctgaaggtccaggagggttcatcgagcctaaatggctagcctacggtgagatcatcaacgggcgttatgctatgttgggtgcagtaggtgcgattgcccctgaaatacttgggaaggccggtcttatcccagcagaaacagccctcccttggtttagaaccggtgtgatcccaccagcaggaacatacagctattgggcagacccttacactttgtttgtgttcgagatggcactcatgggatttgcagagcacagaaggttccaagactgggccaaaccaggttcgatggggaaacaatatttcttggggttcgagaaagtaccttggaggtctggtgag

SEQ ID NO: 17774 - DNA, 642 bp, Gossypium hirsutum
  Clone ID: LIB3831-002-Q1-K6-G12
gggctggtgaggctgctattgtgtatgagcacggggctgacgttgaggctctaatgccaaagctcaggcgttctgattactatacagaaccccgaatccaagaactggcagcaaaggaaagggctgaaccagggtactgtcgccgtgtcaaggactttgtggttgggcggcatggttatggaagcataaagttcctgggtgagacacatgtgagatgccttgatctagagtcccttgtccagttcaacaaccgtgaggtaattgtttacatggatgacagcaagaaacctcctgttggacaaggtcttaataaacctgcagaagtaacgcttctcaacatcaagtgcttcgacaaaaggaccagagagcagtatacagaagggccaaaagtggagaaatataaggagatgcttaagaagaaggctgaggaccaaggagcagactttctctcctatgatcccatcaaaggagaatggaggttcagggtaaatcacttcagcaagtaccagttggaagacgaagaggaagatgtgctgtaacaatgtttgttttattcatggcaattgttaaggaagagtttgtgggtggcacatgtgttttctccccattaaaaagggtaatgtcttgaatgtacagggttgg

SEQ ID NO: 17775 - DNA, 685 bp, Gossypium hirsutum
  unsure (1)..(685): unsure at all n locations; Clone ID: LIB3831-002-Q1-K6-G2
ttagagtaaaagcttcagttccctccccattatatggatgggaggatatttcccgcaacagcattggtataattcatagtttagaagatgacggtgatattggtattgctttctgcttccgaagcaagcctttttgttgctctgtcactgatgtggagagagtgcctccttttgaagtgggacaagaggttcatgtcatgccatctgtcagtcagccacgacttggatggtcaaatgaaactccagcaaccgttggaaaaatttcgaaaattgacatggatggagctttgaatgtaagcatctcatttttttctttctaatctaggagcgagtggcctggtctaatgttactggtggagcactatatcttttattacgacattatcgcatcactgcatcagttaaagctatatgttgactatattattttgtgagttcatccattaaattactttaatggagaggttctgcttgagccatgcaggtgaaggttgacggcaggcatagtttgtggaaagtttctcctggagatgcagaaaggctttcgggatttgaagttggtgattgggtccgttcaaagccgagccttggcactagaccaagttatgactggaacactattgngaaagagagttagcggtagtgcatagtgttcaagatacccggtatttggaattggcttgct

SEQ ID NO: 17776 - DNA, 645 bp, Gossypium hirsutum
  unsure (1)..(645): unsure at all n locations; Clone ID: LIB3831-002-Q1-K6-G3
gaaaaagagcaaaaagaaggccaaaaaaacactggctgacaatcacagatctaagatcccaaatccaaatgcccctttctcatttcttcatatcaaagtgtaaataacaggcaagatttagaacgatagtaagcaagcaaccatgtcaaggaggcaagctaatcccatgcgccgctttgtcgacagcggaagcttttctctcgctggtgccctacattccaaaccccgatcttctcccattttaccaatcggtcttgtccttgtgggcgctatccttcttattggctatgtctatagtggctcaggcaaattccgaggcgaagcagttagtcggatcggaggtgactattcatgttcagtagaagttcagagggtaataccttttttaaagaaggcatatggtgacagcatgcacaaggttttgcatgtaggccctgatacctgttcagtggtatataaacttttgaaagaggaggaaactgaagcctggggtgtggaaccatatgacatagaggatgctgaggcaacctgcaagagtcttgtgcacaaaggaattgtacgtgtggcagatatcaagtttcctcttccatataggccaaagtcattntcgcttgtaattgtatcagatgcccttgattacttgtc

SEQ ID NO: 17777 - DNA, 171 bp, Gossypium hirsutum
  Clone ID: LIB3831-002-Q1-K6-G4
gctgatcattacgaaccattaattgcccatgcttcttcacttgtttcctccgagaaggttgctctcatactggggcaatgagttgagtcctacagttttgcggcggcgtagagatttaaagtagaagtagttcattattttccctatatattgtatcctattctagctgtg

SEQ ID NO: 17778 - DNA, 641 bp, Gossypium hirsutum
  Clone ID: LIB3831-002-Q1-K6-G5
gccatttgccttaatcatcttcctctttctttaaaacctcttcctatttaattcccgactaaacttgcgctgaattccatggctactgccgaggttgtatcagctcagactgcaatccatgaggcagaaacctgaagaagtggtcaaggtctggagaaattgcaacaagaagaggtaccggctgttgctcctgcagcagaacctgttgctgaagaaccaaaggaagcagtgcctgaagcagcatccggagaaccccatgctccagaaactgaagccacagttgaaactgaatcaaaggaggtggttaaagagcccaaagctgtgactgaggagccagaagttgagaaaaaagaagaagagactcctaaggaaacggtagcagagccagttgccgaggagtccaaggagtccaaggagacttctgagccaacagttgaagaaaccaaagaaagcacagagtctacagaagcagcagcagcagcagcagcagcagcagcagaagtaaaagcagaagcccaagccgccccagtggaagcacccaaagaggaagctgcaacagaagaagagaaaccagctgaagctcaagctgagaatactactacggagtaaataagcttgtaagatggggaatcaatggaagc

SEQ ID NO: 17779 - DNA, 424 bp, Gossypium hirsutum
  Clone ID: LIB3831-002-Q1-K6-G6
cgcgtgagggggatagtaagggacgcggtggacatagagagggagttcgtatgcgatgctctcccctgcgcgttggttgggatgaacggcgagttaatgagtcggtacatcgagttcgtagcggatcggctgctgggagcgttagggtaccggaaagatgtacaatgtggtcaacccatttgattggatggaactgatatcgttgcaagggaaaaccaatttcttcgagaaaagggttggagagtatcaaaaggcggcggtcatgtcgagtttgaatggtaatggtggcacccatgagttcaagatggatgaagacttttagggtttagtctagtttagtttgtttgttcggttttggcttttgtattgtatctttttactttctaatgtctccctctccataaatttataaaataggttatat

SEQ ID NO: 17780 - DNA, 651 bp, Gossypium hirsutum
  unsure (1)..(651): unsure at all n locations; Clone ID: LIB3831-002-Q1-K6-G7
cgatccccgagtgtaataaagggatgaagaagatgaggttcctgaattggtacctattgctagtgagatggaattgaatatctctaatggtgcttcagagctggttgaagctaatggcaatggttctgtcagaaaggcttcaaagaagagcaagaaggcgaaaaaatcaactggggacagtggtaaaaagaccaagaaaaacaacaatgctaaatatacagctgcagataaggagaacaatgttatggtaccagcagaaagtgccagttctaatattgagaagaatggtgaaggtgattcaataacatttactgaatcagtgatttcgaaccttcagctccagtttgagaaggttgctgaagaagtaggcttgaatagtgatgttgcaagtgcctgtgatttgcctaaagtcaatggtactgtctccaagaagagaaagagaggaaagcatatggatggcaaaaaatctcagaatggggaggaaaccaatcaaggggaggatgaaattgatgcaactgcaaaatcttgcgagaacagcacaaagagggtaagattttcaatgaaaaacagcatagtttggaaacccccagccctttacctncactaagcttgagaataccgccctctgtcattcctagaggaagtgctctt

SEQ ID NO: 17781 - DNA, 642 bp, Gossypium hirsutum
  Clone ID: LIB3831-002-Q1-K6-G8
gggcaccaagggtcctcagttgagagagattgagagaggagtggatatcgtggttgccaccccaggccggttaaatgatattctggagatgaagagaatcagcctccatcaagtttcttaccttgtgttagatgaggctgatcgcatgttagacatgggttttgaacctcaaatacggaagattgtgaaagaagtgcctacacggaggcagactctaatgttcacagcaacatggccaaaggaggtccggaaaattgcagcagatctactggtaaatcctgttcaggtcaatattggcaatattgatgaacttgtggcaaacaagtctattacccagtatgttgaagtattatcacctatggaaaagcacagaagattggagcagatactgcgttcgcaagaaccaggatccaagattattgttttttgctcaactaagaagatgtgtgatcaacttgctcgtaacctcactcggcagtttggagctgctgctatacatggagacaaatctcaggctgacagagacttcgtgctgagtcagtttcgcaccgggaggtcaccagtgcttgttgcaaccgatgttgctgctcggggattagacattaaagacataagggtggtaatcaactatgacttccctac

SEQ ID NO: 17782 - DNA, 653 bp, Gossypium hirsutum
  Clone ID: LIB3831-002-Q1-K6-G9
cggacgcgtgggcggacgcgtgggtgggagtcttccttattccatttccactatggttactcttacttacctgaacgtaagccataattcactttccccttcagttggagatgtttttgctaatcttaccgacctcgggaccttggatatttccttcaacaattttagtggggatctacctgtttcatttagctcattgaccactctttcggcgctgtatatgcagaacaatcaattttccggttctcttaatgttctctcgggtttacctttgaacactctaaatgttgccaacaacaatttaagtggatggattcctcaagagcttttttcactcccgacttttatatatgatgggaattcctttgccaatggacctgctcctctgccactaccatatagtccacctccacctggtagatctcgtcataaacataaaactcgaccaggaactcataaatccctcgattccgatgctcaatcttcagattcagataagggaccatcggctggacaaattgtaggcattgttcttggttctttgttgctacttgtccttgtactacttgctgttgttttctgtattcataaaaataaaaggaaggtgagcggtgcaagagcttcaagggaagtttttcagctggcttcatgat

SEQ ID NO: 17783 - DNA, 644 bp, Gossypium hirsutum
  Clone ID: LIB3831-002-Q1-K6-H10
tggcaatacagcaatatgaacagcagcaacaacaacaagagaatcacccttccttcttgctagatgctctctactgtgaggaagaagcggatgcaggggaagttttagaggaagagagttcttgtgtgggctgtaacaatggcggaaacccttcatttttcccactgttgttgttagagcaggatttgttttgggaagacggggagcttctttcactttttgctaaagaaacagagcagcagccgtcttgtttcaatgtgggaaccgatgagtccctagcaatggctcgccgagaggctgtcgagtggatgcttaaagtcaatgctcgatttggattcaccactctcacggctgtactttccattaactatttggacaggttcttaagtacctttcagtttcaaagagataatccttggatgatccaactcctggctgtcacttgtctctctttggctgcaaaagttgaagagacacaagtgcctctgctcctagacctacaagtggaggagacgaagtatgttttcgaggccaaaactatacaaagaatggagcttttggtgctctccacactgaaatggaagatgcatccaattacacccctttcatttctagatcacatcataagaagactttggttgaaa

SEQ ID NO: 17784 - DNA, 590 bp, Gossypium hirsutum
  Clone ID: LIB3831-002-Q1-K6-H11
gttggctgcaagcttagcttccagatgctccagggtgggacgttcattgatggatggccttcgaaacacttctctaatttaccaagcacatcaagagagacaacatgtggcagtttcctgtatcagcaacaaaggactttcatacagatgagaactgttctaaaagtagtggacaactgaggggcaaaaaaggtgatgtgtatacaagcattgaaggggaagaaaggggcaagattgggagacaccataattgcatctgtaaaggaagccatgcctaacggaaaggtgaagaaaggaaaggtggtatatggtgtggttgttcgtgctgccatgcagcggggtcgttgtgatgggagtgaggtcaagttcgatgacaatgcagttgttcttgttgacaagcaaggccagccaatagggaccagagtttttgggccagttcctcatgagctgaggcagaaaaagcatgtcaagatcctcactttggcagagcacattgcctgaggcatggatccatcatattttttcccccgaacatgactttttttagcaatccaagcatttagatattttcatgttgtcccaatagcagg

SEQ ID NO: 17785 - DNA, 471 bp, Gossypium hirsutum
  Clone ID: LIB3831-002-Q1-K6-H12
gtgtaactttatcctctaattgaacagctggagcctgatgcagcagctaaagttacagggatgcttctggagatggatcagactgaggttttgcatttgctcgagtcaccagaagctctaaaagcgaaggttgctgaagcaatggaggttcttagaactgtggctcagcagcaacaaactgggggtgctgccgctgatcaactggcttcattgtcattaagtgacaaccttgtctcctgagttttaactgcctgctagagttttcttcttgaacaccatcgtagcgtggcctttgtttagattgaatcagttgcttcgtttgaagctggttatgactctatacttctacagagtgttttggaacttcaataccgtctgacacaagactttcatgctttataattaattgctatgtgattgagttatgcatttcatgcatcataaaatatcttcgggatcgaattgattgtt

SEQ ID NO: 17786 - DNA, 632 bp, Gossypium hirsutum
  unsure (1)..(632): unsure at all n locations; Clone ID: LIB3831-002-Q1-K6-H4
ttctaattcaaatgttccgccttgggaaaatgtttccagttttcagtctgttcctagccattttattgatcggttgtttggttccgaatctgaaaggtctgtcagtttcactgaaaggaacatatctcccatagaagcagataacatgagacgaaaaagcattgaagatcattttggtgaagatgcatcttttggtttgtcaatatctccttcaattgaagatcctgaaacatgctttaattatggtggaattaggaaagttaaggtcaatcaagttaaggactccgattccggtatgcatgatccaaaggaacttagttttagtagggaaagtaacagtgagatgtctaatattgaggcgtataatggggaaaatgaaaatagttttatttcaatggggcatagctacgataagcggtgtgataatgttgcagtaatgagtcatacctataacagggatgatatgcgtatcaccactcctgcctacagtaaggataatgaaattccaatatcaatggccaacagttatgttaaagaggatgccaatattctttctttcggtggctttcatgaagaacatgagattatccctgtgggcaggcctcttggtagctntgacccatcatactgtc

SEQ ID NO: 17787 - DNA, 658 bp, Gossypium hirsutum
  Clone ID: LIB3831-002-Q1-K6-H5
ttttaacttttggcctaatttcatacctggttaggctttgcctttgtgaaccagaaaagtgccatgcatgacacttttttattttctttgacccatggtggtggcataatatgtctcttgatttcctcctattttcctatacttaacctatattttcaactacctaactacaaagttgcaattctggtggcatgtgctatctagccaccaaaaattaatgaaaacaattattattagttttcagaagaatttgttatcaagaaacaggatgttcaagggcaagcgagcccatctctgtgcaagagatctctcataatggattgttctttgtcttagaagggttgtgtcttggcaaagattacattctttaccttgtcctctctttagattttgcagacaaaggcttcttaactgaaagtaagaggcactcatctctttggttaatttggtaaattcctttcctctttgtttacttggtccagtacttttagatgctaaagtattatttactatcataatacctcatcagctctgtaaacatagaaacttatctgagaattgaaaatttcttggatattgaacttaagtgttgctggctagctgctcaaacttaactgttaagtttgaaattacattcaaggagctaaagacgtttgaa

SEQ ID NO: 17788 - DNA, 645 bp, Gossypium hirsutum
  unsure (1)..(645): unsure at all n locations; Clone ID: LIB3831-002-Q1-K6-H6
cggacgcgtgggcggacgcgtgggttcctcttcaatagctttagaaggggaaagtgaacaaagaaaacatatggcaagtgaggcggcggaggaagctaacgtccctgcagcggctgcggcggaagcacccacaacagggaccgagaagcaaccacataagcttgaaagaaagtggaccttggggtttgataaccaatcaaagcctaaacaaggcgctgcttggggttcctctttacgcaaagtttacacttttgacactgtagaagaattttggtgtttgtatgatcaaatattcaagcctagcaagttgcctggaaatgctgatttccacttgtttaaggctggaattgagcccaaatgggaagatcctgagtgtgctaatggaggaaaatggtctgtcactagcaacagaaaggctaatcttgagaacatgtggcttgaaagtttgatggcattgatcggggagcaatttgatgaggcagatgagatttgtggtgtagttgccagtgttcgccaaaggcaggacaaacttgcattgtggaccaagactgcaacgaatgaggctgctcagatgggtattggaaggaagtggaaggagatcattgacatcaatgataaaatacatatagcttncatgacgactct

SEQ ID NO: 17789 - DNA, 659 bp, Gossypium hirsutum
  Clone ID: LIB3831-002-Q1-K6-H7
gtccttcagcttcttccttgggtccaggtgggctagacctggctcaagccttcttcaagcccatcctaaacaccgatccaccttcctccaccaagcgccataccaagatctccgtcatcggagttgggaacgtcggtatggctatcgcccaaactatcctcacccaggacttagccgatgaactcgccctcgtcgacgccaagtctgacaagctccgcggcgaaatgctcgatctccaacacgccgcggcgttcctcccacgcactaaaatcaacgcgtccgttgattactccgtcaccgctggatctgatctgtgtattgtcactgctggcgcccgtcaaaaccctggcgagtctaggctgaatctgctgcagaggaacgttgctctgttttcgaatattattcctccactggcaaagtactcgccggattcgattctattgattgtttcgaatccggtggatgtgctaacttacgtgtcttggaaactgtcgggatttccatcgaatcgggtcatcggttcgggaacaaacttggattcgtcgaggtttcggttcttgatcgccgatcatttggacgtcaacgctcaggatgtgcaggccttcatagttggtgagcatgggagacagctcgtagcactctggtctagcattagtatt

SEQ ID NO: 17790 - DNA, 601 bp, Gossypium hirsutum
  Clone ID: LIB3831-002-Q1-K6-H8
cccacgcgtccgttattctctctctcgcttgaaaaaaaacagaaaagaaaaaaaactatttcttttggcttttcttgatgaacagtcatagactatttgtattttgattgagtaaaaatgtagagaaaaacaaggagagattgaagaacacgacaggtttgtaatttcttctcttgtaggtttgggttttggagggtgttttggttttcttggaagcttggcttgtttggtttttgtagcttccatttcttcttgtttttggatgggaactgtgttgaagaaggagaagaaatatgatggggaagtaattgagagaggacaatggtcgttgttatacagttgtaaactatcatattacacccttgtacaagaattttttgtttctctttttgcatgtcagaaagtccggcaatatccataacaaacatcctttggtcaccttaagaagaagagatctgttttttaaagagtgttgttttcatcaataatcatgaaaagagttggcagctcacattccttgggtgctatgatgtccatctgcccaatctcagatgacaaccagatttacagtagagagtttcagtcgattttagatggatta

SEQ ID NO: 17791 - DNA, 659 bp, Gossypium hirsutum
  Clone ID: LIB3831-002-Q1-K6-H9
gcagcttagtccaacagtccaactccacacccaccaccattggctgtttctgatcatccgaaaaagaatggtgaccgtggaagaagttcgtaaggctcaacgtgcccaaggccctgccaccgtgttggccatcggcacatcaaccccgcctaattgtgttgatcagagcacataccctggctactatttccgtatcacaaatagtgagcacaagaccgagttgaaagagaagttcaagcgcatgtgtgaaaaatcgatgatcaagaagcgatacatgtaccttacagaagagattttgaaagagaatcccaatgtatgtgaatacatggctccttcactggatgctaggcaagatatggtggtagttgaggtgccaaagctaggcaaagaagcagccaccaaggccattaaggagtggggccagcccaagtccaagatcacccaccttgtcttttgcaccactagtggtgtggacatgcctggggctgactaccagctcaccaagcttttgggcctccgcccctccgttaagcgcctcatgatgtaccaacaaggttgcttcgcaggggggacggtgctccgagtggctaaggacttagctgagaacaacaaagtgctcgtgtacttgttgtgtgctcggagatactgctgttaccttc

SEQ ID NO: 17792 - DNA, 512 bp, Gossypium hirsutum
  Clone ID: LIB3831-002-Q1-N6-A1
gaaaatgtattaccatttttctaatccttcaaaatgtatacattcaccaagcaaaaaaaaaaacaagcgaagaaagcgggaatatttttctcccttttagaacttctacaaaaattagcacggggtcctcattgcacctaactctaataaactcaatcacttttcagcggcagtagccaagatttttgttttagagttcatcatgtgaatcatcctcttcttcatttgacgcagcaccgccaggacctccgccggatctttgatatacagctgtgatgatagggttgcaaacagcctcaacttccttgagcttctcctcaaaatcttccttttcggcattctggttgtcatctagccactcgagcgcttctttcacggccgtttcaactttctccttctcgtcggattcaagcttgtcagcaagcttgtccttgtcgctaatctggtttttcatggttgaaacataagtctccaggctgttgcgagcatcaatcttttccttcaacttcttg

SEQ ID NO: 17793 - DNA, 578 bp, Gossypium hirsutum
  Clone ID: LIB3831-002-Q1-N6-A10
aagtcatattcatgcttagaacttggaaaagccaaggtggctgttttaatctctcctgtctcaactgttcttcaagatcagtgttgtttttactcccatttgggtacccaaatgtcatatcagtgaccttggggggtcccatctgctcatttccagtgaaatcatcccttgttgtgcttgtcttcttcacatgactggattcagtggaagaagaagagaagctcggaccggaatccgaagttcgaggagtcccatgtttcttcctcggcacgtaccttgtggggcctaaagtaagctcaatctcgctctcatctatggattctaatattgtgttacgaccatagtctggttctgcaacaacattgtttgaccgatgatcaccctcagccgccggatgttccaagtcaagtctggttcttgtatcgtgatgcatatttatatttccatggtgataattattcttcaagctaaagtttcctttaggccggctgctttccatgcttttcatcaacgtcttctggattcgatatagaccatgcagttcgtacacctgttctttgaaagtttcttcatgtttt

SEQ ID NO: 17794 - DNA, 353 bp, Gossypium hirsutum
  Clone ID: LIB3831-002-Q1-N6-A11
cctgccctcgtaagctgttttaacgctctttttttggttgaaatggggaaatattttaaccctataaaatgtagttttttaaattattacagagcaaaaggaaaaaggctaattgagatccagtgagaaattgttgctataggccacttgttttcagtttgagcttgttacattgttttcttcatcatattttgctgtctcattgactcaaagcttcccttatactgaaatgtttgctgatttttttcaaagtgcagactgagaaattgtgtgggtatgaatttgccaatctggtttaagagaattcttatttttccacagtcttgtcttttttttactctaaataacttgag

SEQ ID NO: 17795 - DNA, 605 bp, Gossypium hirsutum
  Clone ID: LIB3831-002-Q1-N6-A12
gggtttttaccgcttggtaataagcaaccaacataacttcatcatgcaattggcaaatccaaaattcatcctcaaagtcgagcacatttaaaagaagaataagtaaaacagggggtaaaggaactatgatgatgagagagggattggggggactgcactttgaattcgtcgaaaagctgtttttactctctcctttagaccttcattttcactctcaacatccccactctgtttatcaagatgagccacattcccatcaacacttaccataagctttccattttctcctaatttcacatccccaaacagtgaaaccaggagtgcatgaataaccttttccgccttcttcccgttttcttcttccgtttttatggcctcagattccactactaccttagggatctcccggctgatgttcagaaccaatgccacgatggaatctgacaccatgtcacttatgggatccgatgtccaatgcaatgagatgtgcctatctgaatcctgcttcacagtcacactatcatgcactcgcaatgttggaaccccagactcttcatctgttgaagattccacactctcgtatatctgctcgagtcgatgcttta

SEQ ID NO: 17796 - DNA, 105 bp, Gossypium hirsutum
  Clone ID: LIB3831-002-Q1-N6-A2
ggtatgaagtctcaaacacctttatttagaaaagaaaaaaacatcagttggcatcaaagattctttaaaagacaatgcagaaaaccatgattggcatcgaggtac

SEQ ID NO: 17797 - DNA, 518 bp, Gossypium hirsutum
  Clone ID: LIB3831-002-Q1-N6-A3
agtaatataaagaaaccacttccattttccatttccttccctaccaacaaatgaactagtcttgcaagcagtcagaacttaggcttcctgacatgaaggagccgagagatgggggagaaacagaaggttatgttcttcacaggacacaaacaattataaagaaaaacactacatcctcacaccctaaaacaagttataaagaatgacaataagaaaatacaggcactcatcatccagtcaccacaattagttttctctttcccctccattttttgaagaaaagtagtttttaacatccaatacgtgtcccaccaggtttgagctcccttaggttgaaccacagcaagccggtctttgtgcagcttgaccagccccagctgcctggtcaggtttattgatcttaattgttgaaggctcagcctttaagtcagtatcgacgagtctttgctttatgtcccttgctattgaaaagaaaacttcctccacatttaggttagtttttgcacttgtttcgaaaa

SEQ ID NO: 17798 - DNA, 525 bp, Gossypium hirsutum
  Clone ID: LIB3831-002-Q1-N6-A4
ggtttttcaaatgaaaggaacaaattcttatttatgaatataacttaaattattcatcaagcacactaccacacacgtcagccaattcatatatcccaatcaccaagtttccctttttaactgaacacataaaattaaataatgaagggcgggccctaaaaaaacaaaactacttaaaaaaaggggtcaaaattcagttccgctccatatttggagggatttatgtaagaattctacacaacccagagagagttatggagtaacaactaacaagccagtccccctttacccctcttttttttttttctagttcaaatgtctaagtagagctataacatctctcctgctgttattattttagcttacctgctgctgatgactgccgtagatcggatatgccccgtatgcggtggctgcagccgcgtacatgcctaagccatttggtggtggcaaagcatagccgtaaccatcgtagacctgccctccatagtaagctccaccccactggttactggaatcagccct

SEQ ID NO: 17799 - DNA, 506 bp, Gossypium hirsutum
  Clone ID: LIB3831-002-Q1-N6-A5
tgttttttgatgaaaggatagatatatatatggatgggagactacacaagattcaatcatgaatcgtagcaacggctcacatcacatcacaactagtaaattttccataagcgaatattagaaattagagacatacatcacaataaggagggctgatagtatgtttactttgttagaaactcgaatccactctacacactaaacaacatgtaagccatataaaactcaatctatgtacttaggtttcttgaaaccacctcacttcccactttaccttcacaaaatgttagcccacagctatttaccgcaagaagttgacatcaacatgctcaaactttcttcttctccatttctcattgaatttattcacctctaccgttttcgcttcgactttaaagaggtgacagattgagagttgctatgccagttacgcttcctctggttgatgaaccagttgttgatttgctttagctgcaatcctgtttcctccacaagtttggccttat

SEQ ID NO: 17800 - DNA, 488 bp, Gossypium hirsutum
  Clone ID: LIB3831-002-Q1-N6-A6
ataaataccccgtatataataagcaacaacgtatcaaagtacaccaaataatgggaattggagaactcccatttatacaaacaaatataagtgggcgaaatcaatactcataataaagacacaaagggggctaaaaaccttattaaaccagatccagtatgccgcagattaaaaaaaaaggggtacttcaaggagtagaacgagaaagtggtggagaaaagaaatgaatagagggaattgtagttcggatttgggggagtgagggaatgcttggcaaagggggcagtatggcctttggtccacttggaaatctggaaggaagtggaggaagcaccccacgccttgggaatgatggtatggatggctttgggaatgatggtttagggaatgatggcaatggtgggaaagttttttttaacaaacttggcgtttgaggctgctgcagaaggtgacgagctgctaccccaacatgaatgcttgcaaatgac

SEQ ID NO: 17801 - DNA, 396 bp, Gossypium hirsutum
  unsure (1)..(396): unsure at all n locations; Clone ID: LIB3831-002-Q1-N6-A7
ggtttgggttttttttttttttttttttttttttttgggtttttttttttttttttttttttttttttttttttttttttttatttttttttttttttttttttttttttttttttttttttttttttttttttttttttttttttttggggtgttggggttttttttatttttttttttttttttaattttttttttttgttttttaattataaaaaaatttaaatattttttnaaatataaaaaaaaaattnnnaaaattaaattttnnattattttttttttaaaaaaaaaaaaaaaataatnaanttttttttttttanttnataaaaaatnnntttaaattttttttttnnattnaaaaaaaaataanaaataatttatatattttttttt

SEQ ID NO: 17802 - DNA, 465 bp, Gossypium hirsutum
  Clone ID: LIB3831-002-Q1-N6-A8
ggagaatctgatgcgcttgcacaattctttttttatcatcaattaacttaattagatccattctcgttcgacaagaaattgatggattttgaaaagaaaaaaggggaaaaaaagatggggggcgtatattcaatgtaaactacaaacatgcaagccttttcagtacccttgataaaccattacctgcagcctttcaagaggtaggaagaggtagggcttgagaaactcacggcagttgaggactttctattttcggtaccctttccaggcgttccacattcgctaaagtcaaggatgcgacgctccaccaagatatctgaagccaaatgtgattgagtctccatttgattattctctttgtccattttagaattgttggagcgtcttcccttcacaattgattctggagtttcatttcccaaaacttccaaagcatcagcataagtagctgcagtatgctcactt

SEQ ID NO: 17803 - DNA, 505 bp, Gossypium hirsutum
  Clone ID: LIB3831-002-Q1-N6-A9
cctcaatagtataataactaaaagatatgctacacagtcttcatagatattgtcatcttgtttttgcaaacattaacagaaaactgcaaaaaccaattttccctaactcaatttaagcaaccctagctcaatttaagcaaaatgaagtgggagaaaatttattgcatgagcatttctatttagtgtcaagggtgcctcaagatgtgtccatttgacagcctgttcgtttaaaggcacacaaatcctagtcatgtatgtatttatgtcacctggtagccacttacattgcatgctttctacttttggatttgcattttttttgttaagcgacttagtccgagtccgacagtggcatctggtatgaatcctttggctcaaaatcagttattgaaggaggtaagttgcgtttcgatgcattcctttcccggcatctctctcttggtttcagtttatcctacaccattatctgcttggctcgggtggcttgactgaaccgaacgatttt

SEQ ID NO: 17804 - DNA, 485 bp, Gossypium hirsutum
  Clone ID: LIB3831-002-Q1-N6-B1
aattaaaaagtaaagggaccatatttgatattattaataatgtaaaggaaagagaacaaaatccataagtcaataataaaactaaaaggaatgtgcctctcaatgtactagccacaaaatttctcaaggcaaagtcaggggggagaatattggtaccattgaaatattttcatactttttaagataattgtttctagctttctaataaaattaaattaaaatacgaaatcgaaccatttaacaacgaaaaaaataccaatttttaattcattcttctaatcagctcgttgatataattctcccggttaccggcatctcctccttcgacgtaatggttcctcttcttcttcaaaccacccagcggcgccttcaacttgaaaggccaaaggaagttattggcctctttaaaatgaggacccactgtcatgatctcatggatgagatcttcgacacagatgatcccgtatttgccaagcgcctgctcg

SEQ ID NO: 17805 - DNA, 507 bp, Gossypium hirsutum
  Clone ID: LIB3831-002-Q1-N6-B10
caaacaaggggagagaactattaaataaatgcaactcgttcacaaaacttctaggtcttactatggatttatcttcgtgccagtaaaagttgagtaggtttaaagcacaaagttgttggggcgggaaagatcaagtggattgagaaatgaactgtaaagccctaccaaatctgaaaataacaacatgcctactgactgcaaaggatgagccaacaatgcaaaatcaagttaccagcatctataatttaaagcaatgcatcaagctagttcagcatcagcctttggggcattttctgttggtttcatcaaggttggaggggtatctccaggtttggacagatgtggaatgtatctccagcagcgtttgtgaactccacttatttttttgggagcatctgcagttggagcaccgtttttgtggaccactccccatgccttgccatgccttccatccttataaagattgatcttggtgatctgatatgaaacatcagtccaatgagtttt

SEQ ID NO: 17806 - DNA, 581 bp, Gossypium hirsutum
  Clone ID: LIB3831-002-Q1-N6-B11
gatccatgccagaacaaagtgttacgcttgaataagatatggaattaggtgaccttttaaatggataaagcatgaaaaccgacctatatctttccaaagcaaagacaagatatggaatatatattttcatgcgtcccaggggaccatgaatacaaacattttcttaatttcctacatgcctaaaagggatttgatccaccaaatgcctttggtgtccttgggagtgtcatctccttcaggtggaggatcgctttgtggggtcttgtgcaatttactcacatcatagccctcatctttagccttctgcaccagctgattgtagatttcatcatccatatgtgtttgcctgcacaatacccaaagataattcctgctaggctgaccaatgagagcatactgataatcatcatcaaggtgcaaaacccagtaatctccaacgatgggaatgatgggcaagaaaggaggaacatagaatttcaccttcagctttgcctcatcactctggggatccgccttgtacgcagtgccttctataaaccctcttttgccatcagtgaaagtctcgttaagcacatgcacct

SEQ ID NO: 17807 - DNA, 591 bp, Gossypium hirsutum
  Clone ID: LIB3831-002-Q1-N6-B12
agtccaaaagcagaggtgataattaatttttgtatcagacctatatacaccagaattaaaaagaaaatgaaaatgaaaaatctgtggtacacaccttatacatgagcatgccattagttcaagtttgatgctttctagacatgtccataagctgctgtaagtctgtggatgtccttagcagcacacatattgggattttgtaaaggttctcgctgctgttgctgttggttatgagtccacatactgtttgatgaattattagtgaggaaatgtgtttctgatttgatgtccatgttgtacaaggactgtggagtttgattttgcaaagcagcggccattaacaatgggttattcagatattcgctccattttatatcttctgcttgactttccattagatggagtggagcctctttctctggtgtgctacaatctggtaatccccaagaggagctattattgtcgtagaaggaactattgctttgcagctcagtgctgttgctgctgctgttactgttgttgttagcggaggcacccgtttcccaatagcgggaaccattcacggtgaacgaggccattgaaggactatca

SEQ ID NO: 17808 - DNA, 582 bp, Gossypium hirsutum
  Clone ID: LIB3831-002-Q1-N6-B2
aaaccaaaatcagcactttgaaaaacaagattaagtacaattggtgagggagaatacagttattaaatcaaagcaaattgttcaaggaatcctcacaagaaaaaaaaatccagattgcctggttttaacatcttatttgtggagattgagacttcaagcagtaagctcaagatgcttgatgtgtgcgatatgctttcccgggttcagcccctttggacaagcacgagcacagttcaatattgtatggcaacgatacagcttaaactcatcatttatggcctccaatctctcctttgtgtattcatctcggctgtcgcttatccatctgtttgcatggagcaaagcagcaggacctagataagactcgggattccaccaatagctgggacagctagtgctacaacaagcacacaaaatacactcatacatcccatctagcttagctctatcctttttactctgcagaatctcttttcccgccgtcggcagcgggtttttcctcttcaaccacggttcaatactcttatactgattataaaagttggtcatatccaccaccagatctttaatcacgaacatatg

SEQ ID NO: 17809 - DNA, 457 bp, Gossypium hirsutum
  Clone ID: LIB3831-002-Q1-N6-B3
atggcatcatatatcaaagatgatcaaagatcaattaccaccgccatttttattaagacaaccggaagacggtttaagttttaagagtaaaaaggaaaataccaaaagcacaccattcggggaaaatcaagcaagagaattcaaagcaaccaacatatatcttagttgcaggcatcggggttagccaagaggtaagcttcaacagccttgtaaactccttcactccctttgatttgagccttgatttcatcttcagtgatcacatagtcgccaacagtgtaaatttcatcgagctcttgcaaaggcttcctccacctgcagctgcctcaaacttgttgtcatagctgattttctcaagcttgtcccccaaaggtccaccttcgatcaaactataactgtatgacaaattcttgtcgtcatgtcctccaatctggtgcttcatatattggaatggaag

SEQ ID NO: 17810 - DNA, 500 bp, Gossypium hirsutum
  Clone ID: LIB3831-002-Q1-N6-B4
aataataataattcttctgcctttatatcaaaaacataaacagtagtgttaatcattctcagaaccacaaacacaaccttaattattagtttaaaaattacagattaaaccaacaccaatgcttctttgtcacctaaccggggaactgctcctttcatggtacaatcacaaatagaggcatgtccacactaactggttttccatcctcagctagtatctcagttatggttccggattggtcagcttcgatttcgttcatcagtttcattgcctcaatgatgcagattacttggcctttctgtactttatctcccaccttgacaaatggcggttcacctggtgccggactctggtagaaggttccagccatggggcatttgagtggaggatgagatgagctgctagttttagccggggatgcagctgagggcagtgctagtggtggaggggctgggtttgaaggtgcccggggtgctggtggggctgctgccggaaatggg

SEQ ID NO: 17811 - DNA, 604 bp, Gossypium hirsutum
  Clone ID: LIB3831-002-Q1-N6-B6
actccttagaacaatgaaatttcatttacaaaaaaaatacaaactagaacacttcatcaaaggtatcccaatgaatcccgagaccattatttgcaatgaaacataaaataaaataaaaatcattccacgaccattggagggtcacccaattttactttatcacaacaatgttcagtttcacttaaaaattcatacgaataaactctatcgataaaacaaagtccagtaacaacattccgacaaataaaaaacttaaactcaaattaaaaggaaaaaaatcgtaagactgaatctagaagtttcactaaaccaggacagccataaaatttgataaacaacaagctcctctgacctgatatgacactgactcggttactcaagagcgtgcaggtgcagtgggtggggcaccgaggagactcgcttgctggagctcgagttcattgaactgctgctcgcggtccatctcaatgatcaaagggacaaataagatcaagaaggtagttccggcgatccaagcggctttgccggtgctacggaggagtttcttggagacgaaagcagcatcagaggccgcttgcttaccacgggaaacaatgggggaaga

SEQ ID NO: 17812 - DNA, 405 bp, Gossypium hirsutum
  Clone ID: LIB3831-002-Q1-N6-B7
gggagatagcaattgtaacacttaaaaacggtttttaaggaaacggtaacaagagtttcaagaactggataacccttttattatgcataatgctggacatcccccaaccccaaaaaaaaaaaaaccaaagaaagaatttcccaaaccctttctttttttctttcagggaaacaacacttttttttaaaaaaattcttttttttacgggggaaaaaaaagctttaaaaaactttattttgcacccatttttccccttatttggaaccttttttaaaggtaacttccccccttaaaattgttttttttgactccactaattacagttcctaatttcccattaatacctttacctttttaactttttgtttaaggatttttataatttcaaaaaaattaggttttttg

SEQ ID NO: 17813 - DNA, 321 bp, Gossypium hirsutum
  Clone ID: LIB3831-002-Q1-N6-B8
aaggaaaaaaaacgattaaaaatttattgatactaaaatgggctaaaagataaattaaagattatccttttttggtagatggaaaaaaaaacctaataggaaaaaaaaaagacatttttttaagggggaatactaaaaaagggggttgatagggggacgaattaatcaggcaaagtttttaaaggagggaccaccaaatttcaagagggccattaaaccgaatacgagttacgtaatatttttaaattaggaacttttaaatgggattcttgagctgttgtatttggaaattaaaatgggttcctttatttgatgggaagg

SEQ ID NO: 17814 - DNA, 606 bp, Gossypium hirsutum
  Clone ID: LIB3831-002-Q1-N6-B9
accattaaccataccatagctttatgattttcacatattttatttcatactactgcttgtacaactatatatatatatatatatataaactgagattaaaaatcccattaaaattatggcattatagaaaattaagggtgaaacgtgttatcagcagaggccatgataggttgattcaagaaagccaaatggaaaggattaaggaaggcagtatcagctacagcaggctgagtgaagtcaatgcttgttttatcatcatcgtcgtcgtcatcgccatgatcatcattcaagaagctgatgatttcattcaaggactgtaacctatgagtgagttcattgagttgagctctaagcaccgagttctctgactcaacattcaagaggtgttgtgtggtgaaagttatgtttgtgatgatctcatggttttgtttctgcaactgagtcaactgagtcattagatcatctaaatgcttttgtttcctcatccttgatctccttgctgattccctgttcgatatcattcgtttccttttcctttcgtccattaatgcttcttctgagcctgagttgatttgtgttgctgatgaacccgaggatgtagccatt

SEQ ID NO: 17815 - DNA, 158 bp, Gossypium hirsutum
  Clone ID: LIB3831-002-Q1-N6-C1
ccattaatgaaaactgcacatccgattccccccccccttataaacatccactcctctcaaacatcatacccaataataaaacgaaaatacaaaattccattgaaggtttcctttttcttttgcccttcttgtcccgatcttgttttttcgtttttttt

SEQ ID NO: 17816 - DNA, 298 bp, Gossypium hirsutum
  Clone ID: LIB3831-002-Q1-N6-C10
ggagggagaaatcaatgaattcctaatgaagaataatgcttcaaagaatccattatctatctctttaccaggacactgaatgttagtgtcaaggggcgattgcaaagaggtaaatgattgaaactcgagttcaatttcgtttctcaacataagagttataagttgcaagtacacttacttccaagactttcagacccccagttcatcaatcttcatcatcagagcttccatcatcactactataatcactgctatcatcatctggatcaagaatgtcgagctcaacatgtcgcacctg

SEQ ID NO: 17817 - DNA, 608 bp, Gossypium hirsutum
  Clone ID: LIB3831-002-Q1-N6-C11
ggtttttaactttgcaacaagggatcagattgcaaatctcttacaaactttcttttttcacaacagagcagaaaacatttcatagctcgacatttaaaaactcaaccccacacctaaaattccccctaatattatatatcaaccccagggattgtcccttcttttcataatcatccccataaattaaagcacagctttttagtttctttttacttttcacaacagagtagaaaacatttcaaagccctcatacctaatattcccctaatatttttatatcaaccccctgctttgcctttattttcataatcatccccataattaaaacacagatttttagctccgtactacccataacaacatcaacatggaatatttccctaatcgcccctaatgttatctcccattttcaaatctgccctccgttttttaaaaaatattacggaggtaatcggatcttgaaactaccggagagttctaaatagagacgaaacgatcttattctggatccgaatatatctactcgggtgaacatattcagatctcagatatcaagtcggagtatacgcctgagatctctagtggccgaatcatcgatccggacatgc

SEQ ID NO: 17818 - DNA, 597 bp, Gossypium hirsutum
  Clone ID: LIB3831-002-Q1-N6-C2
gaaaaacaaaagtcaccatatttaactggaattgacgggcgcacaaccccatgttcaaacaatgccggcgaaaaaaggaaaaggaaaagacaagatgaaatacaaaggagcttctccaattgaaattacaaaacagaatattattctccaagaaaaaccggcccaatgttatttaacagcttcaatttactcctctgccaatggaactgattcagccagcttacggtacttaagagcataaaacatctcaaggtaacgacgactctcacggcgttcaaggttggaaacatgcttccagaatccatacactcctgtcagggtcaatagtctctccgagtaaatcttccatgtatacttctcctctattcgtttcaagcctccttgggagatcttatcccagtgagatggatctttcttacacttttcaaagaaatcgacgagtatgtcagcagcttgatcaccatggtaaggatcaatgttgaaaccagatttcccatggacaataatctcggctggtccaccgttacaggttgcgaatgttggcaaaccgcaagtcattgcctccacaacagtcaatccaaaggcttcatacaatgc

SEQ ID NO: 17819 - DNA, 469 bp, Gossypium hirsutum
  Clone ID: LIB3831-002-Q1-N6-C3
aacaagaaatagatatctatgacctccagcaatgcattgggaatacaaatgtatagtaagaaagaatgcgacctcgagttgaggtctagtaattttaaactcgtaaccaacaatcgtgttgtttcactgttcataagttggtgagctaaaactctgctgtccaatcattcatccttgtaaaccagctttgactatccaactacggatcatttattgtataggtggctttaaaggggacgggttcttctgccgcttgctctgccgcagagtagtgcgtttttggggatcgggtattcatcccttagtgaagttgacgttgtgaagacacgcaaataaaactgttgtcccaggtactgtctcgcccaatactcggaccttaagttccacattcctacattgtcaagcgccacataaatggcagtccatgacttggggtacacctgagtggtacaccgcgaaacggcatcac

SEQ ID NO: 17820 - DNA, 524 bp, Gossypium hirsutum
  Clone ID: LIB3831-002-Q1-N6-C4
ggtttgggtttttttttttttttttttttttttttggggtttttttttttggagcccacaattaccaccttaatcatgtaaaataaaaagaatcagcaagtttataaatgctagttacagccgttggtcatagaagtagtaataaaaggggggggggcgcagaagaaaatatgctcaaactaccaagcaatagcaatggcaagcgatggaccaacaatatgcaggcaggggtactagaagacagcagcagcgccaactcagctaagcaaataaatgaagttttaagatagaagcaatgcaatagtgatcggagaaaaaaatgacacagtaagggccaaagctttatctccctttcattgctgcaaagggagcggccaaatcatcataatctggtaattttggatgcacatgctgggctgcactcgacctatcagactcgaatgagctagcacgagcataaactttgggtccttttgattcagctggttgggcaggagggagagatattgatcgggctggacggg

SEQ ID NO: 17821 - DNA, 573 bp, Gossypium hirsutum
  Clone ID: LIB3831-002-Q1-N6-C5
gggaccctcaaacaagcttttattagactagaagttgaagctgacattatgatgtacaaaggacgaaacaggaataaaagctagttttaacataaagctacctaaacagaaagttactgccatttctcataaccaaacagggctttttcttctttttttttttcttcttttcatttcccattctacaagtactgggactcagttattcacatggagactgatccatatgctatgcatttgcagctcctatattcccatggatccatagatttagaaggagaaagcaaaggactactctgtggcagcaacaactgttggcccttccaccttgaatttagcaccccatatctcctcttcttcagcaggcactgcagtgatcttgttcttaggattctcatagcttcttaatcctcctactgctgtggagtagaaacagccttgaggaaaagaagcaagagatttgccacaggcacctttcagcaattcagcattatcagcaaaggccacatatccgtcggcggtgattccccaatagagaggaaccttaccaaattgatcagaagccacaaacaa

SEQ ID NO: 17822 - DNA, 475 bp, Gossypium hirsutum
  Clone ID: LIB3831-002-Q1-N6-C6
gccaatcacaaatgaaaacgcgttcaaattagggcacaaaatacgtgttacacatagtcatgtctggtcttaagttgttagctgtccactgaaaatgaaccaccccatgagtttttaatccttggtattggggtcctaaggcatcttttatattacatcttgttgacttcgtatgtaaacaaaaatatcccaagaaaaaaagaaacaattattgtaaagtacaaaacaataatgtgaaaataccattacaattacagaagatgctttaaccaacgcaattaagtaacacaaaattcaattattgtcactctgaaaaggggtccctttgcaaacttttccatggattcacagaggaacttccttcaataatcaaacttcactttggtccatggttagctagaatctgtttgccacatgttaacaacaattttcaataggttggaccattgaaccaaattacctttaatgtttagtg

SEQ ID NO: 17823 - DNA, 395 bp, Gossypium hirsutum
  Clone ID: LIB3831-002-Q1-N6-C7
aaaggggctaaaacttgcctcaaatcatttaatataacattcaaaacaggcatgacttccatttccgcttatgcaaggggggggggcactaaaactactttgggcaagctttaactaaatcaaaacatagaacatctttaaatccttgaaaatccctttcatctatgctcactatagagcagaagcccttgcaaagcccagttcaagcaaaaattttttttttcgaggggaaagcaaggggcaaaaggggataacatggccaatggcactctcaacagccggggaaaaaaactgggccctctaaatcttggtgaatgcaacaatgtcacagctttgaatgtattcattgggtggctctgtcgggaggcactcctttttaaggggattaactgacc

SEQ ID NO: 17824 - DNA, 555 bp, Gossypium hirsutum
  unsure (1)..(555): unsure at all n locations; Clone ID: LIB3831-002-Q1-N6-C8
ggtttgggtttttttttatttttttttttttttttgcactcaaataaaagcacatagaagatttaattcattacataaaaacagaacgctgcgctcccccactcataacagcataatcaaacctagcatacaaatattcaaatgaaaacacagggcaaagctgccagttttattcttagatcagtactgatagtaatagtaatagcagacgattcgacatgggattttcttgccatggtctatccattaattaagtttccttgcggagatgagcagccatgtccgctgtgagttcgataaagaactggagcagagactcgggatgtccaataccctcgtgcagcttttcataatccagagtccagtgcactatactgcctttaccgtcgctcttgggggaagtttggattgtaatcacgaagcttttgtattcctccatcagatctccttcaagcattttgaaagttattgactttttctcatggtccataacttcaactacctgctttgcagttttagcctttccatcatgcacatatctncagcagataacga

SEQ ID NO: 17825 - DNA, 476 bp, Gossypium hirsutum
  Clone ID: LIB3831-002-Q1-N6-C9
agcaatcaaactatgacatcaaatatctatcacataccattctttgttccaagttggtcagtaaaacagcggagcgcaaacataaactcgaaaacagtaaccgcaaaaacacctaactcgttatctctaccttgattctgacgcgcaactatggcactcatcaggtaatgggaaacaaagcatattcgcactgccacggaaaaaaaacaattgcatatttactttgttacataacatgatattatgcgagcactgtgggtctgcctgacctttttccttccatagcgtctttctttttccgacagttggtgcagaggaaaggtccttcccatggctttgaagcaggtgagaaaaatggcccggagttcactgttaaaccctcagctggaggttgatcgacttgacagaccgcgcatttgaagagtcctgagtttgtattcatgggaaaatccttacccaacctttcagcgagcatg

SEQ ID NO: 17826 - DNA, 539 bp, Gossypium hirsutum
  unsure (1)..(539): unsure at all n locations; Clone ID: LIB3831-002-Q1-N6-D1
aataggatcacgtaattgcattaaatcaacataacaacacaaaacgagtatctgatagccatttgacgaagctcttgcttagcatacaatggatcatttaggctattcataccataagatgctgtaagatatgcatacttgcacacaactactccccacagaaaactaacataattacagccttggtaagtactaaaacatccatcgctactgctagtcccattcagatgtcgaaacccgttttctaggcacataaccttcatcctgatccccatcgtcctcttcttcaaggttgttaacacgttcacattcatcaatccattcactgtatatgtctattggttcagtcaaagctgttataacagtgctaaagctttcctggcatattctgcaagaggcttcgccaatcaagttcttcatatcaaggcggcactcaacactggttccatggttacaaaaggggcagctgaacacagngtcaagcttatccatccgcttcttaggagcaggctttgctcttgatttcctctttnccatac

SEQ ID NO: 17827 - DNA, 615 bp, Gossypium hirsutum
  Clone ID: LIB3831-002-Q1-N6-D10
ctaatgtaacaaccaaaccaaaataacataagagcatagggctcaatgaaaacctccaaacaaaataaaagcaatccttacaacattttaaacaaaatctttaaaaaggtttgaaaatgctaagagaagcaactaaaagtatgcactacatgttccttaatactatatgattactcattggaaggcacaacatgcatgcatgaatgttggtcttagtatcgaccaattccccaaactctgattacaccatctgtataaccactaaataaggtgcttccatctgcactccagttcaagcttgtgcagtatatcaccttcttcttgtttgcattgtcggtgacatcagatttctcagcctcagctttgagatcaaccttcaagtcttccacaatactcttactttccagatcccagatcttgatgctctgctcagtggcagcacaaagccagtacctgttggggctaaagcaaagcgaatgaataacagaaccagcgtcaagactgtaaagcttctttccttcagccaaatcccacaacaaaataacaccatcttttccgccactagcacacaatgaaccatcaggtgaaaccgcaacagtgttcacataaccggag

SEQ ID NO: 17828 - DNA, 537 bp, Gossypium hirsutum
  Clone ID: LIB3831-002-Q1-N6-D12
gagaaagaacacctattatttaaccaacaatcatacagtgcacaagcccttcacattaacaagtatgcagaaatgaattagatcctctaatgaggtcggtccgaagaaataataagttcattaaacctatggagttaagaaacaagtaatcttacatgccacgaaaggcagcatactgcataagaaagatagcttcctaatacatcattaacctttacattaggaagagcagcagccactctgctgtgcaacaggctgacctcggatctgtactgttggaggctttgcattgtttgccgttggttggcttgccattctatctttgacagaggcagccatggccatgaaagcttgttcaacatttgtggcatcttttgcactggtttccaaaaaaggtatgccaatttcatctgcaaatgccttggctgtttcgtatgacacaactttattagctgtaaggtcacacttgtttccaaccagtagtttgttaacgttatcactagcatagcgatcaatttcactcagccactgcttgac

SEQ ID NO: 17829 - DNA, 611 bp, Gossypium hirsutum
  Clone ID: LIB3831-002-Q1-N6-D2
catctaaactagttctaacgtattatgacatgatatgttccactgtcaaattccgaagttcgacaacaggttgccactacaaaattcctaaggaaccagataatgatcagacataaacatagaatcagtacaagcacaatgctatgatgattttatctctacattagccgtcatattccccttgtgcgaacttgttttctggatagtaaacggcaataacttgatttccgccgaatttccgaccattcattgcagcttgagcctttttggaaccttcaacatccgagtattccagaaataccttcccgacacctggggcaggttctccattcggatttgggcgtgggatgacaatattcaccaatgcaccatattttccaccctcttgtctcatatcttccacaatgtcctcgtactcatcatcatctctgagatcatcaacattaagtgcttgagtcaaacacacaacctttgtcggcacaccttgtggttgcaaaattagcctctgcaaagcaatctgctgctgtgcatgctggagtatactctcttgctcgggtttaggctgggtagcaccctggtttgctcgcctaacagtgagcgttttatcaccc

SEQ ID NO: 17830 - DNA, 587 bp, Gossypium hirsutum
  Clone ID: LIB3831-002-Q1-N6-D3
ggagccaacaaaaaacattttaataaaatcataatatccctacattaaatgtcataccgcattatcaaagaaaataaaataaaatccatcatgatacttatatatctctgcttgttcaggcaactcaataatgtcgaattggagataacaaaaatgcagattttctaagggaaaacaagaaatgaaataagatcagaaagatgtcacaacacttgtaaaaggacttatctatgcctctgtaacagggaactcaaacacaacatccttcccagcaagcttccggtaaactgcagaaaaggtctcgagcttatactcggtgttgtttcgttccttggggtccaaaaacaccttcattaactttgatccatcaattgcatatctagtgcgcttcccaacaatctcagcgggtaagacaatatcttccagcattgcctcatgtacagcagtcaatgtgcggctgcgaggcctctgaacagcaaaacctttctttgggggcctcaatatcctccgggtagcaataagaatcacatcctttccactgaacttcttttcaagctccctcacaagctaacatgaaccttgcgaaa

SEQ ID NO: 17831 - DNA, 521 bp, Gossypium hirsutum
  Clone ID: LIB3831-002-Q1-N6-D4
aataaagcaggctaatatattttatatgtgaggaaaaaagtctcctgttaaaagagatcaatttgtctgaaaacacaaagaatgcttgaattacaatcccaagaatataaaaccatcaagtctccaaagtcaagattcaggagttgcacacaagaaattgccatttaagaacctcactaaaatacctcaccttttggcttttcatttcgaaatcatcatctcacttcaattattcaacgaattacatcatccagcttcgtgcagttataggctatcttcgtccgtttcttcaaacggctcacattcttctttgttcaactgctcaatggtagcattaaggtcccaacatctcctaacacccctttctgtttcaacctcttgtagctttggtgtgcttaaagctccattgcagaaaatttccattgcgggacagaagctcacgtctacttcatccaatgatgggaacttcaaagtgtaattccctgaacaaaagcttttgaggttttgtagatcataaagct

SEQ ID NO: 17832 - DNA, 485 bp, Gossypium hirsutum
  Clone ID: LIB3831-002-Q1-N6-D5
aatagaaatttatttcattaacaaagcaagcttttacaagataatttattctctcagcatataatataaaactccatataaagaactcttttctcttttttttttttttgagagggggggagttctatataggcactcttgataaccgggaaaggtagcttaagtaggcccataatataacacatagtaggacaaaacattagagttttgatccttggatgggcaaatatacagcagcaacatttccttaagcatccaaatgaatcatgcatctcagacctataccctggagcatgtagtcgaatgccttgttaatatcggcaaaaggcacagagtgtgtgatgaacttgtccatatccagccccagctccttgttcaaatatttgtcgacaaacatgggaatatcagtgcgtggtttatagttgccataaaaagcacccttaagggtcctctcacttagtagattcattggatgagttttgaat

SEQ ID NO: 17833 - DNA, 389 bp, Gossypium hirsutum
  Clone ID: LIB3831-002-Q1-N6-D6
ggccaaaatccttataatgcattattaactaggcaaaagggttttaaacctaaaataacccaaaacacctgggggggggggaaaatttttgaacatgacacaaattgcctagtctacttgcaaagattttttcagcataaaaaaattccaagcccgcgtatcttgggtcatgctaaaggctgccttcatttttctctcacatgttgcttgggggtagggaccatgtcaattctggaatgatataaaataagagccagggtttggatctttgacagctttgaagttgtcaatactcatcccaaaacgacccaaaacagagttgcccaatttttttagctttccaaacatctcctctttcatcttttctcttttctctgcggccaatggtt

SEQ ID NO: 17834 - DNA, 505 bp, Gossypium hirsutum
  Clone ID: LIB3831-002-Q1-N6-D8
ccatggcaagctgtcacagaaaaaatatgtaaacttgaaaggtcgatttacatacatacatgcatacaggattttattactcaaaacattcaggaaaccgtgggaagtctcgggacatgccaactggggtctggcgactcgtagggaatttttatggaggtagcagtgcttcattcaatcaaaactatggcgacaccattttcgtgtccgcgtaacaattgcttcctgtgcaatattcatcgtctccagaggtctctgttcttcaaacctgcatttcaggcctgattcaaccagtaacagatagataagcaaatgcattagaaagcttggcaggtgaagcaaccactcaatgaactcatctggcgggttcttctgaaagatatagccatatgcgaggtctttgtaacctggtgggcctggttggccagcatcaaacttctcatatcttgggctctcttctgagctgatcttagtttattcattattttatccattgatgacgatc

SEQ ID NO: 17835 - DNA, 535 bp, Gossypium hirsutum
  Clone ID: LIB3831-002-Q1-N6-D9
actatgcaaattgaaatgttctaaatattatgtaacaagcaaacccttagacttgtatgtttctcacacagatgcaaaaatcctaaaccatccttaatgctttatgtatttacaataccgtattctattaggctatgttattcagagtatccaaacatttggcacttgtgaccaacacattcagacatgagtacgaacatatgatcctttaagcaaagaccctctaagtacatgaaaaagctttagaacaaatttagcatactcgtatctgatagacctgatccgagtctgagcaataggccaccaccaccaggctaggtttatactacacaacctatataaacctatagctgcacttgaaggctacaatgcctcaaaaagtcaggaactcaagagcaagggctttgttaaccagtactgctgaaacctctgacgtgcatactccaggtagttgaagtctatcttgtttacatgacctgagatgattccccataagccccaaaacagatgattagcaagagtgtatttctcggca

SEQ ID NO: 17836 - DNA, 285 bp, Gossypium hirsutum
  Clone ID: LIB3831-002-Q1-N6-E1
tcgccttggtatgacaacgaatggggttacagttcccgtgttatcgacttgatccgacacatgtctaaggcttaagtgagtgagtgattgtgcttggtgtatccaagctttagcaattttaatttagaagagatgttatgagagaataaacgaattgtacggagcatatttttgtgtgaagaagggttgtttcagttttattacccaagtacttgaatgtttcaagtttcattgcagttgtttttctactttaatgcatacgtggtgattatggtttctctactt

SEQ ID NO: 17837 - DNA, 529 bp, Gossypium hirsutum
  Clone ID: LIB3831-002-Q1-N6-E10
caaacaaatgatggtatcagaattccatttcaccggctaaacccaccttccaattcttttccatctacttatggtggtaaagaaagcagtaattaaggaggtgaggccaatgaacatcagagtacccgaggttagcatataactaaggaaagaagtgcaaaaggttacttatacccatatacatccatgagaaattttttcaagtactttttaacttaaaccaaacttgggaataaaacacaggtcattccgctttgcctgcacgttgcaaccaaggccaatctgagtcacataggttgactggagagttgccgtcgttatccttcgtatctttgtctgcattttgttttacaagtaatttggcaatgtcttccctctcacacataacagcatagtgcaatggggtttgaccttcattgtccttagcattcacatcagcattcctgctaagaagtgcttcggcaattttaagatggccacgatctacagcccaatgcatcggggtcctgccttcactgtcttgcaaatg

SEQ ID NO: 17838 - DNA, 582 bp, Gossypium hirsutum
  Clone ID: LIB3831-002-Q1-N6-E11
gacaaaaaatatgtccttcaaatcttatcattcatcataagctttggaagcaaatgcagagacacaagaaatcaatccatcaaagatacaaggaagaacccacaacaaccatacatattgtggtatgtcaatcttgatttgacaacataaacatcacccaagaaacatatacatatcgttattcactcaagcagcttcctcttcttcttcctctccttcctcatactcgtcgtcagcagttgcatcctggtattgctggtactctgcaactaaatcattcatgttgctctcagcttccgtaaactccatctcatccattccctcaccagtgtaccagtgcaagaaagctttcctcctgaacatagctgtaaactgctcactaaccctcctaaacatctcctgaatcgaagttgaatttccgatgaaagtagatgccattttcagacccttaggtgggatgtcacacacgctagacttcacattgttagggatccactcaacaaagtatgacgaattcttattctggacattaatcatttgttcgtcaacctccttagtgctcatcttaccccggaacattgc

SEQ ID NO: 17839 - DNA, 579 bp, Gossypium hirsutum
  Clone ID: LIB3831-002-Q1-N6-E12
ggttggggttttttttttttttttttttttttttttttttttttttttttttttttttttaaaaaggcatctctgagggataaggaggagaaaccaaattttttataacaaggccaccctatcagcctttacaacctaagctttactaaaagggggggtgggctaaaaatcctagccaccattacagcagggaacaatgctcaaaaacagcatagaggggcaaaattaaaagtttaagcgtcattaaaagcaaggactccaggaagttgtttgccctaaaaaagctccaagctggcaccaccaccagtagagatgtggctcattttgtcagcaagcccagctttttccacagctgcaacaaagtcacctcctccaataattgttgccactcccttcccactgagttccgaaagctttttggcaaccgcctcagtgccggcagaaaacttctaaaactcaaacacacccattggcccattccaaataatggtctgggtagggcccaaaaattcactgaaggttttgatggagtcaggtccaatatccaagcccatccaaccatttgggatccctgatgct

SEQ ID NO: 17840 - DNA, 570 bp, Gossypium hirsutum
  unsure (1)..(570): unsure at all n locations; Clone ID: LIB3831-002-Q1-N6-E2
aaaaagaatatactatatttaaactacaattnaaagttaaacgtgtataattacacaaatcaaaattcatacaaaatttgtatagttcaaaagcaacttggctattaatatttaaagatactagactgctgaggacttcaaatacaaaataaaaagaaatacagttaaaagaattaaaggcatttcagaacaaatttctctttcacatatccatctctctacatataaatctaattgatgacagcaacgttctgcattttagttgttaactctgttgcgctcaagcaattgagttgagcttccatttgttttaacacagttctcaatccactgcaagcctcaacaaagggttccgaagatgttggaaaactttcaacctcttgctgtatttcattgatcctacttgacattttctccaaggccagttttatttcgtcaatctcttgaggggggtaaagacaggctccaatctcatctatctctgctccgacaccttgacatatcttcaataatttctccaaagaacccacaaatttaccattgtcatttggggtttaagtttaagcatac

SEQ ID NO: 17841 - DNA, 524 bp, Gossypium hirsutum
  unsure (1)..(524): unsure at all n locations; Clone ID: LIB3831-002-Q1-N6-E3
gatcaaagttactngaaatatatatnagaagggcagagnggtgaagctctcaactattgcagattgtnncagaaatagaaacctaagggttaaagcgctcaaattctagaatacctaaaagtttcagacacctgctcctctaagggtgagggatgtgccatgaaatnnaactaaagnnaatcaatataccgagcatctnncctacactttnnacgttattatcatttnnngtcgtcttgatgaaagaaatgctcanngaatcnnnagagctanngcaattgcnnattcatcaaaagcaatgtnntgattggtgaaagggagactatagnnggatagnngtgtcggcattcaacctttcctaaaccagcnnncattgctccnngccttcaatctnntcagtccttccaaagtatgtgcctgtnnttgtgcttatcacatannnactcttcaaggganntggaccgcactttttcttctcaacccttttgtagaatggggaccaaaacgnncatgctcaggaaaga

SEQ ID NO: 17842 - DNA, 519 bp, Gossypium hirsutum
  unsure (1)..(519): unsure at all n locations; Clone ID: LIB3831-002-Q1-N6-E4
gttacttaaaanattatattggtaatttcttaaattttatggagtcgcaactctagacataacataccactttatgatggaagaaatcaaacttataggactcatagatgacagatcttccattttactctaaaaagtgtgggccactacatttacccaacttaccaactaggcaggcttcaaatccctgtagtttccacctacctaatcagtaccaatacaccctacaaaatcatattagagactgcacaaacttctggtccaaaacacactaatttacaggttgtttattcaacacccaggtcctatagcaaaaaactgacatcatatttataagaacatatgtaagcactaaaagacaccaaaactccatcgtttggaaaccatatattactctcttttttccttaagagacgtgaatttctccactggcatgtacctcttttaccgttttctcggactcatcttcttcgncttcttcttctacttcttcttctgcattttcttcctttgcatccc

SEQ ID NO: 17843 - DNA, 547 bp, Gossypium hirsutum
  Clone ID: LIB3831-002-Q1-N6-E5
ctcttcgggaatttctttgatcccgttttcttcttttccttctgctgctgttatacagtcctggaatctgaaacaacttgtgagatggtcgtttgttattcctgacacttgcatgaaagagtagatgacagtaggccccacacttcgaaagccccttcttaccaaatctttgcttatgacatctgcttttggagttttaaccggaacctgtcgaggatatctgaatctgctaactataggtttgggggtcacgaaactccaaatatacttggcgaatgacccaaactccgctataaccttaaatatttggtgggcattctcaacgataggacgccacttcaattcccataacaaggaacttggtggacttccaagagctattaacttcttctcaatcaattttgataccgcaagaaggtccaaattccgaaaaacctcccttaatatggggcttttgcttaagaaaaccagccatggaaggtcaaaccatggccccacgagtaccaataggttgaaccggtttttaatattatggaccggaacctcc

SEQ ID NO: 17844 - DNA, 509 bp, Gossypium hirsutum
  Clone ID: LIB3831-002-Q1-N6-E6
agttataaagcacaaatgaccttcatttcttgaggacttctaatattacacagtcatcattctctttcacatcttgcaagtctaattttatagggttttaattcataagatataataatgtaaaaaggttttacaaagctaacaagatactaatgcatttattcagctggcaaatgtcatttcctactactttttttcaaagatgatttcaccaactggacttacagccatagcttgtgctccattaaaaatctttgagaagcaggcagctgaattgcataacccttgctacatttgcactcagctaacatttttgcttatggagagccagcttgttcacagaggtctagtaggtccaaagtctcaggaatcgagagctcaagacgaaacttgggaccatcatagtggtgcaagactggccgaaaagcatcctcttccaatgctttgcagagtttcctaatacggattctcacctgagcaggaaatcttgactcgcctttacacttttt

SEQ ID NO: 17845 - DNA, 482 bp, Gossypium hirsutum
  Clone ID: LIB3831-002-Q1-N6-E7
gtgatagaaattcataatcaaaatagatgacaaacgccacacggttttgccttcatttgtagagcatgaagttattcgaatattatcacaatagcacaacagtcaaacaccataatgagtggggaagcgtcaaagcgcttcacttgagcagccccttagacttcaaatattccacggtttggtcgtagatttcctcgatcccatacttaaagctgaatccttcgctaataagcttctctgaggaaatgatcaacttgggtttggaggggaaatctccaaaatcggtagggactttgaagtcagggtatcttttgttgaggaactttgctagttctggcacactggtattgacagcactgcatatatatcgacccgatgcagattctttttcagccagaaaaacatgggctcggcattcgtcttccacatgtgtgatagagatcgaacctgacagcatctgcattcctttcaaagcatttatg

SEQ ID NO: 17846 - DNA, 528 bp, Gossypium hirsutum
  Clone ID: LIB3831-002-Q1-N6-E8
ggaggacaattaatgattgacatactgtttcaatgccaatcatccattcttcttttaaacaaaaccactaatcatttcactctttatccatttttcataacatctataacacatctgtacatacatttttattgcccattacttggcattagacagttaaaacatttcatcgtactcatagtaataattggacaatggaagcaaccacagcagaaagatcatggacaaccttgttgctagcatatattggaaacttgggttggtttttgaatcccctgccacaagcatcggcttcattagctgcatccgtcgccccctcgacaccgaacttagggtcgcctttcgtgacagcttctacagctaccgggatatcgtatttaacaatggcgttgtaataatcagcacagtcacgcaaggccattttcagcttcggatctttggccactttaagcagcgctgtgatctgccgcagcgttgcggtggctttggccttcagtttatcagttccgatttgcgctagccccgcta

SEQ ID NO: 17847 - DNA, 422 bp, Gossypium hirsutum
  Clone ID: LIB3831-002-Q1-N6-E9
aaatcgggggggggggtaaccaaaccccgttggggaaacaaaaagcttattcctttttttttgggggggattggggggaatggttaaattcccccctttttaaaagaaaaaattttaaaaaaaaaccgggggggatccctcggccaaattttttttttcccttccccggaggggggggagttttggttttccctcccgccccttgggccccttaaaccctccacccgaaaaaatcccgggggcccaaacctaaggggcttttttttccgtgggccccggggctccgggggggggtaaaaaattgggcggggaactgggtttgggggaaaaaaaaaagggaggggggggggccccacatgttgggggaaacgggttttcttttgcgggacccttcgggggagacgggacttttttgggggggg

SEQ ID NO: 17848 - DNA, 526 bp, Gossypium hirsutum
  Clone ID: LIB3831-002-Q1-N6-F1
gagttcaattcttttccatttggattgagtgacattgaaagttacaacttacaagtggaaatggtgacccaaatggcctccattttttgttgaatttataaggtaattaaaaactgcaaattctggcttcatatgcacaggaacgacaaccttcatttgttcctaaaagatcagtttttcttcgccttttactgtccgtgaatgttgcgaattataccgggtcaattctaccgaactagtatactgtcgcaaagggcttgaacgacttgagatcgagaacaaccccggcaatcgaaccggcagctgcggcaatggtgataaagagacaagcaatgctaaggatttgaagacaaacccatcttgtgctccacttaggtatcttcttttgtgaaatgtacatctcaactgggaaataaactgttaatggccaaaatccaagtgccccaaggagtccaacaatgtcattaaagaaaggaagaagcatggagatcaatgttgtaatgatcacaaaaattgtcctccaaac

SEQ ID NO: 17849 - DNA, 469 bp, Gossypium hirsutum
  Clone ID: LIB3831-002-Q1-N6-F10
acaaacccctatgtgcaatacttcaacttatcaaaattgcaatcaatcctcttgtacatgttgactagaattccctgaaatttctcgagaaatcaaataatttaaatcgaaggcagacagtctttctctatcaatggcaggtatattatatgtcatgtgttagatatcaagggcatgataaagaatagtgactgccttccatatttctatccccttgcctgaattgtgtcatggaagtttagctttaggagattcgtgaacccaactatccatggtaggcaccattgtagcaagctaacctttaagaagcatatgctttaacaaaattgagtttcacattcagctagcactggatgattctttcgatttctctgtcactgcagcatccttctcggagttgcttgtatctctggtgtgagcctgacttgtctgtgcctgactggaggactgagtatccggagcaagtccc

SEQ ID NO: 17850 - DNA, 578 bp, Gossypium hirsutum
  Clone ID: LIB3831-002-Q1-N6-F11
agaatccattgatttatacacaaaggaagtaagttgctaacaaatccaactaaaatacacaataatactccccaccctaaaaattcatgatttcattctaccactctttcagtatcccgtcggaaattcgcaatcaccatacttagggggttgggtgacgacgtaggccgccccgccaaaataacacgtccccatgtggcgtccgttcttttgataataactgttgaaagcgaacgaagcgtgggcttccagggtgttgggatcgtaacacgtggcacctggttggatcgaatggcaatcagcacctccttcaccgcaggcgaaatctagagctgcctgcagcttctcttttccagcttcgccgttcgcaacgcaccacgtgttccccgtcgtactcttcgacacacccccttttcctccgttgacgggttgattcccggcctccggcgaccgcctgtcatggtaattcttcaacccttctacagtgaaagggatatcgtaaactttttcctctgtcgggtaaaagaggccgtaatttcgttcggatgtaggcccgactttgttgttttcattaaaaa

SEQ ID NO: 17851 - DNA, 564 bp, Gossypium hirsutum
  Clone ID: LIB3831-002-Q1-N6-F12
aaccatcttgcatgcttcatcataaacttgttttgctgcctcactgctcaatttttcactcccatctttgcgcaaatgttgaaatctaaacttttccaaacgccggggttcacggccttccttctcagcgttttatacaacaaaacaattgttgttaacaattttcaccaatgagcacagaataattaatataagttacatattgattaatatgtaatacttgcaaactgtgcattgagggtcacatatactgtactaccagcagtgtgtgcataacgcacatttggtggagtttttttggccttttttgattgggcctattgtttaaattaatgaaaaaaaatgagactaataggaaagttaagtttattatgcctcattcaacaaatcacgcatttatgcaccccctactttgatcataccgtaagtggaagcagaaaaaataggacatttagtataataaaagtgcatacctcagcttgtgatgttccccatcactccgctagccacttccattgatcatcttgcacaccaggaggattggttttgtatatttcttcaatc

SEQ ID NO: 17852 - DNA, 477 bp, Gossypium hirsutum
  Clone ID: LIB3831-002-Q1-N6-F2
gggtttgggttttttattttttttttttttttttttttttttttttttttttttttgaggaaaccatatttaaataatatcactcaaataaaagcacataggagatttaattcaatacataaaaacagaacgctgggctcccccactcataacggggggatcaaacctagcatacaaattttcaaatgaaaacacagcccaaagctgccagttttattcttagatcagtactgataggaatagtaatagcagacgattcgacatgggattttcttgccatgggctatccattaattaagtttccttgcggagatgagcagccatgtccgctgtgagttcgataaaaaactggagcagagactcgggatgtccaataccctcgggcagcttttcataatccagagtccagggcactatactgcctttaccggcgcttttgggggaagtttggattggaatcaccaaacctttggattc

SEQ ID NO: 17853 - DNA, 505 bp, Gossypium hirsutum
  Clone ID: LIB3831-002-Q1-N6-F3
aaaagtaaaatgactaaattttaaattaggaaagagtacaggggcttataacatatttaaccttattatattttcgttttgttcataaccgatgaggtttaagaacaccataagtagtagctgacggcgaagaaaaaccagagccagtagattcttttttctcagattcttcagtggaatttgaatgaaacccatttttccctgccatacaaggaatcaatttgaaagattctgttctatcacaaatcagttttctcgagaaaaacatagcacaatcggcttttgatcgttgctccggcaaatccaagatacagttgttcttaacgttgagcttcttcttcattaccaaatcccggcatgccggtccgacttgggtgaaataattactcgacaaagacaagttttgaagattcgataaccggcaaaccatttccggtacttcgccgtaaaattcattggcggctaaattgagttgctccatctttttcaaacaaccgaacgaatg

SEQ ID NO: 17854 - DNA, 470 bp, Gossypium hirsutum
  Clone ID: LIB3831-002-Q1-N6-F4
ggtttgggtttttatttctattgtttgatcttccacgggtctcaaggatctcttcattaagtcaatcggctattggtagtattctctagctctttattcctgcaatcatggagattgaattagcacagttaccaaaaatgaagaagaagaagggggttacagatccaggctgattcaaggacgcaaacagttgtgggagattaccagcttgtggggtgtttcttaacagctagtatcgttaatttttcggctataatgagtactttagcaaatttatggcattccatctgtggggtacagatccaagatttgggggagaaaatgtatcttttcaagttttttcatagcatggatatggagagttttaaagggtcttccgtggacgtttaacaatcatttattaattctgagcaaattgaaaagaggtgaagatccccttaaaatacctttagtttatgtttccgtttggg

SEQ ID NO: 17855 - DNA, 490 bp, Gossypium hirsutum
  Clone ID: LIB3831-002-Q1-N6-F5
acaaaccacacattttaaattaaattaaaaacttcagaataaaaaacatatattgtctatgtcatgtctgaaaaattaaaacctaggtgaatgtcaggaaattactttatcctacattaagacatgaatgatggggtaagttataaaattaaactgcaggcaaagaaatgtttatatcagtggctgaatttcttggctcctgtatgttggcccaattttctgttctgaaactagcagtagtagcaaagttttgtttcagggtattggaattttgttgtgaatgttgcacaccgatgccgtcctctttttctgcattcgatgcaggtaaatcgactgtggccgggtttggtgcaagagttgctggtaaggactcatttttctgcttcttggacttttggtcgtgctggttgcctggtacaaaacttcctatgacaacctgtacaggactggcagctatgagaaggcctgctacgcctccacctacaacacg

SEQ ID NO: 17856 - DNA, 485 bp, Gossypium hirsutum
  Clone ID: LIB3831-002-Q1-N6-F6
ggcattaaaaagtagaggaattgaatatttcaaaacgtacacataaaacaaaatagtaacacatcttgttacagacgttttgagtcatagaattggtatagtacatgatcttatttgattgcagaatgcaagtattggggacaatataactagtatatcggcacaaccgcgcaaggaagcacttttctccatctgaaagagctgggattccatcaatatcatcgatcaaatgcttggtctaacattgaggcgagaagcaatcttttgacccaaagatttgtcagcctgagaccagtatgagatccaaatgctgcggatctcgtgtgtgacccttggatcagacaaggcatcaatccagcgattaataaaccgttcttgcctgtcagctgaaaaggaccggtatcgttccccaggctgcttaaagttgttctccttcccaataatgcacttctctcttttgccgctcaaaacggtgctaggaatag

SEQ ID NO: 17857 - DNA, 541 bp, Gossypium hirsutum
  Clone ID: LIB3831-002-Q1-N6-F7
agcaaaacaagactgcattaatggcaaatactatataatcttccacacatccctaacatttttatttcaaacccatttggtcatcttcatacaagaagataccaaatcccacatcattttcccacccccaggcactttcgcatcacccaaacacaaaaaaaactctaaaaataaaacaaaaacctaaccatcatgaaatttcagtaaaacaagaaacaatcaaaccatccggatgttttttctttcttgataaaaactcatcaactcttctctcagtacctgtaatgaggaggcttgtaaggaccttcaacaggcacactaatgtaatcagcttgatctttagtgagcttagtgagcttagctccgagcttgccgaggtgaagtgcagcaactttctcgtcgaggtgctttggcaatacgtaaaccttcttctcatattttccagttgccttctccttccatagttcgagctgggcaatcacctggttagtgaacgagcaggacatgacaaaacttgggtgtccagtggcacattccaagt

SEQ ID NO: 17858 - DNA, 569 bp, Gossypium hirsutum
  Clone ID: LIB3831-002-Q1-N6-F8
aagattccacaatcacattaacattgaccagtttaaggctcaacagaaatttacttgtttcccatacggtaagttcattttcatgggaaaataggatagcatattaatgcccaaagcagcacattcaaatgagatgactagtttcttagaaaagataaacattcataacatacaacaaaacttaggccatgggcgcaaaatcagttaaaaattaacacatgcattcagttcactctttgccttacggattaacaggcaaaaatggtatgggaacttactgctgtgattgatgatgatgaccggtatctgaatcttgttccatctcttcggcgtcctcaaagcgttgatcattgatttgaagctcaagaacactgctagctaggtcatggtgaccatttgaatgaccgattgtgtttgttggattctgggagaaatgccattccacatcatcaccagctccagcttcatcttccaactgatcagcactaaaaatccaattatgtccctcttcttctccttcttcaataggctccggatttagttcagcgcactcacagaatacttgaaaa

SEQ ID NO: 17859 - DNA, 580 bp, Gossypium hirsutum
  Clone ID: LIB3831-002-Q1-N6-F9
aagaaaaaggaaaaggaactgaactccatttaaataaagcaaagtttgaggcacattaaaaataagtgccacatgcatagagaagaagcattacactttgattattctttacaaattcaatggtctgaagaaaacttcattggattcatccaagcatgccagcctttactttgaactcatggctgcacagttcttgcttcaacagattttacatggcagagctgctcctgaaggatcccagagctttagcaccggatgccctcaatataaactggtgatagattgcggcaatggcagctccaataaaaggtcctacccagaatatccaatggtcatcccatatcttgtcctggttgaagataacagcagcccccaaactacgagccgggttgataccggttccggtgatgggaatagtggctaagtgaaccatgaacacagcaaacccaatgggaagtggtgccaagacagggatatgggagtctcttgcattcctcttgggatcagttgcagagaaaacagtgtagacaaggacaaaggtgccgatgatttcagccgccaaaccagttccagtgctgta

SEQ ID NO: 17860 - DNA, 517 bp, Gossypium hirsutum
  Clone ID: LIB3831-002-Q1-N6-G1
acgaaaattcatactatcatatctatttccacaaaagaggtgcttggctcaagagtgagctacaaacatgagcgccacttgaaaataaatgagaaaaaaagaagcatagcataaaccatcatacaaccgttacaatctgtgacaacagtaaccacagcttttatgaaaacgacagagaaagggaaaatggtcctaaagttctaagaaccaaagctttgttccacttttctctcaactttttcacttgtattccaaaatcatgttgttttcaggagccaagccaatgctggcccttagtatgttctccagcattgcacgctgcttggacagtgcgttcaccaccggtgtgcctggtggaacaagaggggctttggtgaggtaactgaggattgtagccacaggatggaaagtgtggaacttgccctctccatcagccttgaactggatcctggtgctaagttcagcaaggagaaccaaatctaggataatgggagcagccaacagggaatcctcacat

SEQ ID NO: 17861 - DNA, 555 bp, Gossypium hirsutum
  Clone ID: LIB3831-002-Q1-N6-G10
ggatgaaaactatatgtagagttttaagaaacatatataatacaaaaataaacctttcctgcaataaaacagttaaaaaggagtccagtgctgaaacctaagttccttacattcatcataatcaacaactaggctttcaagtggttataaaccatatataaatatatatatatatacttgcatggcttataagatatatatatatgcttaaccagagataaagttggtagaacattagaggctgctgcttgcatgtcagcttgaatagatggaggtggaagagagaagcttatacaagttgaagaggagtttggtcttggttggagtaatcattattactgggttccagcaggtttactggcagaaagttgcgattgtaggaggaggctgcttgcatcagctggtttgattgttgttgcgctctttcattttcagctatttttgctcgcaggtacatgttatcgttctgcagttcaacttccctcttttgcatgaatccaatttctgcaaacagtaattcgttctttttggatctgattctacaaatgcctttct

SEQ ID NO: 17862 - DNA, 567 bp, Gossypium hirsutum
  Clone ID: LIB3831-002-Q1-N6-G11
acagtggcattaacaaagtctatttcagttctttctcgcagattacagaataaatttacacatgttttactgagatcaagaaaggagcagaaagggatttggcaatggagcttttagccggggggatagttccatggaacgggtataggcactttcatctaatggaacttgaggttagtcaagacattgttgttgaaagggtcagccaagtgatccaacaggttctggtatggtcctacacctgtcacgagcccttgtatgaagtaacccaagattgccaacattgccaatctcccattcttcacttctttcagcttcaaatccttcaatgacttctcatctttcccaaaaccaagtgggttaaacagtggtcctccagggtatgccggctcaccagaccctccaaggtacttctcgaaccccaagaaatattgtttccccatcgaacctggtttggcccagtcttggaaccttctgtgctctgcaaatcccatgagtgccatctcgaacacaaacaaagtgtaagggtctgcccaatagctgtatgttcctgctggtgggatcaca

SEQ ID NO: 17863 - DNA, 559 bp, Gossypium hirsutum
  Clone ID: LIB3831-002-Q1-N6-G12
gtgttggggttttttcaatttaaatttcaatctaaagcttcgaattaaaattcaatttcacatttacacatcaaagacctactttctattcctattgaaatttcataacaactttacattttatttagactggtccctagtgtatgaaaccagggggggagcacaattctgactaaattatctaattccaagagtcagcatcgcaagaacagaaaaaaaataacgaaatcactcgcacgaaaacattcatgtataccgtctgatgtgacgcttaaaaaagtcgaaacattaccacaatttgccaaccctgtacattcaagacattaccctttttaatggggagaaaacacatgtgccacccacaaactcttccttaacaattgccatgaataaaacaaacattgttacagcacatcttcctcttcgtcttccaactggtacttgctgaagtgatttaccctgaacctccattctcctttgatgggatcataggagagaaagtctgctccttggtcctcagccttcttcttaagcatctccttatatttctccacttttg

SEQ ID NO: 17864 - DNA, 556 bp, Gossypium hirsutum
  Clone ID: LIB3831-002-Q1-N6-G3
ggtttttatctgtgaattttccatcaattaaattaataaatataaagtttgtaatgttaaggccacaacaatagtgatatctctttttacccaacatgctatatttcatttgagatgagaatatatttctactttatcttccatgaggggcagatagaagaaattaatgaaaatttgatcctgatgaaatttctcttgtatcagttatatggctttaggtggaacacttgacaagctggatggtatgatccctttgatgcagcctgctcaaacttcttaatggcaccttcgttttcttctaaactattctggaggaaaaatcgaacccaccacgatgaaccccgcattttagccggtcgcccaaatttggataattctgccactttagctctctgattaccagggtaacctgtaaaaacaactaaaccatcagaggccacccttgtcaactcaggtagagtcttgttcaggtatcttggagacaagtaatcaagggcatctgatacaattacaagcgaaaatgactttggcctatatggaaaaagaaacttgatat

SEQ ID NO: 17865 - DNA, 170 bp, Gossypium hirsutum
  Clone ID: LIB3831-002-Q1-N6-G4
cacagctagaataggatacaatatatagggaaaataatgaactacttttacttaaaatctctaccccgccgaaaaactgggggagaagctaattgccccagtttgaaagcaaccttttcggaggaaacaagtgaaaaagcatgggcaattaatggttcgaaatgataagc

SEQ ID NO: 17866 - DNA, 413 bp, Gossypium hirsutum
  Clone ID: LIB3831-002-Q1-N6-G5
aaacaaacgcactatgatttattgttattacttgaaaaagacaacatgcaaactgcctcttctaataaaaacatacaagcacatacactaaatttaaacgacctgcttgggacccaggaaccacccattacagagaacaggggggacatgaagaatgccccctggcccacaaaatgcctgctggaaccttatataaactgtctctccctgccatatgccaattgcatgttaggttagccaataggcaagctatcattggtgggtcatttccatgccccagtcccaagcctaatccaccttaatactatcacatacttattcaactagaattgaaactaattgatttcaacatgctaacttagctaacagtaagcccactacacaagcttgcattgattacccatcttacaagc

SEQ ID NO: 17867 - DNA, 423 bp, Gossypium hirsutum
  Clone ID: LIB3831-002-Q1-N6-G6
atataacctattttataaatttatggagagggagacattagaaagtaaaaagatacaatacaaaagccaaaaccgaacaaacaaactaaactagactaaaccctaaaagtcttcatccatcttgaactcaggggtgccaccattaccattcaaactcgacatgaccgccgccttttgatactctccaacccttttctcgaagaaattggttttcccttgcaacgatatcagttccatccaatcaaatgggttgaccacattgtacatctttccgtaccctaacgctcccagcagccgatccgctacgaactcgatgtaccgactcattaactcgccgttcatcccaaccaacgcgcaggggagagcatcgcatacgaactccctctctatgtccaccgcgtcccttactatccccctcacgcg

SEQ ID NO: 17868 - DNA, 591 bp, Gossypium hirsutum
  Clone ID: LIB3831-002-Q1-N6-G7
ccaccagaaagcaaagaatatgattcattccaaggtccatcttccagacatgtataaattaacttctcatcacagttgagtattcaaagaccaaaagtctataaagtcaaagaacatgtgtgatggaaagtctaaacaggggagaaacaagacaaaaccaaccaaatttagaagaattttaatgactatgcatgcaaaattttttttttccatgataaagcatagtctgctagggggactttgatttcaacttcttggagcgtttgactagaggatgcatgccctttactactttccgaacctttttcacagatttagctttctttaccttctttgtcataagaggcatttcccttataggacctggaggtaaacctttcttaagagcacttcctctaggaatgacagagggcggtattctcaagcttagtggaggtaaagggctgtggggtttccaaactatgctgtttttcattgaaaatcttaccctctttgtgctgttctcgcaagattttgcagttgcatcaatttcatcctccccttgattggtttcctccccattctgagattttttgccatccatatgctttc

SEQ ID NO: 17869 - DNA, 514 bp, Gossypium hirsutum
  Clone ID: LIB3831-002-Q1-N6-G8
cacacaactaatacattaaaagattaaaaagagatgaaggtttgtatccttcatacattacaaacttttattttgcctttaaaaacttctaaaattttcctccattcatctaaaatactacaaagtctaacccaaaaaggcgtcaaataatcccgtgtaatttcaacttctgaaactatatatatatatataactagaatcgaactgcgaaagaagacggtaccagaaaagcattacataaccaacaaattactaaatccaaaggtcaaaagagatcaatgacaggaggtaccatgccttccacctgaggtccattagcatatactcgtcttcccctctcctgctgagtcaccacaccatcttccccgatcaccagcataaggtgaccttgacctctcaagaattgggctacatgaatttcagtgttcgattgaattctaattattttgaagtggcccacgctgttgggatggagacaaccggtcccgtttcatccccacctcaagaaaactgc

SEQ ID NO: 17870 - DNA, 587 bp, Gossypium hirsutum
  Clone ID: LIB3831-002-Q1-N6-H1
aaaagaaccaaatcagctctcattattcaaataaaacaggtaaagaggagccaaggagtggagacagacgccacaaccaagggtttaaccccccaacgaaatatagcattcatcagagtacagaaagaaataggttatcgcgacaaataaaaatactagtttcagttggacagattatcctgggtcttcctgaacagcttatgctcgatatgctgagcaaaggtacgaggagggaacagtggaggttcggtctcagagacagtctccgggagtggcttaaggatgatcttatccttcggtggctcacagaaaactgcccatgagatcctaaccttctccttattaaccagacccctgtggagaatgctcttgaactttccattgctgaggatctcgatggtgtctccaatgtgcatgatgatggagttgggaacacatttagcggtcacccacttgccttggtaaaagagttggaggccaggaaccatgttgtggagaatgaaagtgagtgcacttatatcggggtgagcttcgacaccgagagcgagttctggttgtggacacttggggtagtaattgattttcaa

SEQ ID NO: 17871 - DNA, 564 bp, Gossypium hirsutum
  Clone ID: LIB3831-002-Q1-N6-H10
aacttaacatttgattccttgaaccaaaaggaaacataagcataataaatatagatctttttggaacaaagaaagagatggagagagcgagggagagagagaagggagatttaattaagaagggctgccaacaatgtctacgaagactcggttgagtgatggcaaacgcattacttgctcttgggctctgctcttcttaaaaggtgactgctgctcaggcgataaggacaccgtgccccaagaatcgttcgagctatcactgccaaatgcagcatcaatcactccactagggctgctaggaaccctctcctccaccttcctcttacatgcaccaccattgccttgggcctggggtcttgttgatacatcaaggatgagcttgtaacaatcgtttactttttccttgctaattttaagaacactcagcagctgattttggtagtcaatgggattgaaaagctcaacttggtctatgacgtgcatcatggttgcagtagccaatacagagggaagataatggatgggtcttgaatcagtgattacacagaggaggagatgctcaca

SEQ ID NO: 17872 - DNA, 601 bp, Gossypium hirsutum
  unsure (1)..(601): unsure at all n locations; Clone ID: LIB3831-002-Q1-N6-H11
cctgctattgggacaacatgaaaatatctaaatgcttggattgctaaaaaanagtcatgttcgggggaaaaaatatgatggatccatgcctcaggcaatgtgctctgccaaagtgaggatcttgacatgctttttctggcggagctcatgaggaactggcccaaaaactctggtccctattggctggccttgcttgtcaacaagaacaactgcattgtcatcgaacttgacctcactcccatcacaacgaccccgctgcatggcagcacgcacaaccacaccatataccacctttcctttcttcacctttccgttaggcatggcttcctttacagatgcaattatggtgtctcccaatcttgcccctttcttccccttcaatgcttgtatacacatcaccttttttgcccctgagttgtccactacttttagaacagttctcatctgtatgaaagtcctttgttgctgatacaggaaactgccacatgttgtctctcttgatgtgcttggtaaattagagaagttgtttcgaaggccatccatcaatgaacgtcccaccctggagcatctggaagctaagcttgcagccatccggacgcgt

SEQ ID NO: 17873 - DNA, 479 bp, Gossypium hirsutum
  Clone ID: LIB3831-002-Q1-N6-H12
gggtttttaacaatcaattcgatcccgaagatattttatgatgcatgaaatgcataactcaatcacatagcaattaattataaagcatgaaagtcttgtgtcagacggtattgaagttccaaaacactctgtagaagtatagagtcaggggcagcttcaaacgaagcaactgattcaatctaaacaaaggccacgctacgatggtgttcaagaagaaaactctagcaggcagttaaaactcaggagacaaggttgtcacttaatgacaatgaagccagttgatcagcggcagcaccaccagtttgttgctgctgagccacagttctaagaacctccattgcttcagcaaccttcgcttttagagcttctggtgactcgagcaaatgcaaaacctcagtctgatccatctccagaagcatccctgtaactttagctgctgcatcaggctccagctgttcaattagaggataaagattctc

SEQ ID NO: 17874 - DNA, 535 bp, Gossypium hirsutum
  Clone ID: LIB3831-002-Q1-N6-H3
ataccataaaaaataggcctgggttttattttaagaaatccttcaacattgaacccaaacccattagtggcacttgtctggttttagccccaattctgtcagttttgatgattattttcgggcttaaactggatagggtaaacccagaaaccaatgttcattaaaagctctgctaagtcttcaaacatcactcgaagaaactttggtacattcgataacagagactatattatgcatatgtaactgtctttcttaattgcttgtctccattttttatcctttttcactaaacatcatatggaaataagctctaaaacacaaatactatcttaactaagataaccctggctgttattctgatatttatgaaatgcctaacccatggtgtaagacggggttggtaagttgataactgtgctcttgatctttgtcatcatgttaatgctgttggtaaccccctgtgatcctattccactgtctttcaaaccctgaaatgggaaatgatctggtccacgagctggtgcagaatttatct

SEQ ID NO: 17875 - DNA, 411 bp, Gossypium hirsutum
  Clone ID: LIB3831-002-Q1-N6-H4
ggttggggtttttttttttacttccatacaacttaaattttctctcttagattcagttactctaaattaggcagagaaactgatatgatgcaatcccaataacaccatatacgtaaaacctaaatacatgagcagctaagctccactcgcatggggggttacacttacatgtctacccaaacactctcataaaatacactagtcttaaattagtttatttttctatgcacatgatgattcaccaaagagattgttgctttatcttacatgttgagaaggccctgtttggagaataacaacctatagatttaattcttctttcccataaatgcgctgaagttcgcgagttgctgcttgaaatgattctttccaaatgcgaaaagatttctgattaatcggtgcaccaaaaac

SEQ ID NO: 17876 - DNA, 599 bp, Gossypium hirsutum
  Clone ID: LIB3831-002-Q1-N6-H5
ggggttttaatagaagaaactattttaattatgacaatgactggtatgtttttacataatgatcccagcaccccattgcattttctcagaaaattaagtctacataatatccccaccctacaattcaactataaatacaggtagggggggggttatttcacttaaaagacaaattacggatggcacacaatttgccatttgtctttagaagttaactacttcctatcaactagtatcactaagctcccgtcccttcgtatcataggggaagagttggatacaaactatcgaaacaactatagcgaccaaaaatagcgctacagctgctgtttgatgacattcattcaccaatcccactgcaacaagaggacataccataccaccaattcttcctatagcacttgcaactcccgcccctgttgtccgcaccgaggttggatataactcaggggaatatatggaggcaactgtaaaggttcccatggcattcatacgagctccaaataataagcaagtagttaacacagcaggctgctggattagcagtggtgaaaggaaaataaatgctaagcccaacataattgccattgactgcttgc

SEQ ID NO: 17877 - DNA, 464 bp, Gossypium hirsutum
  Clone ID: LIB3831-002-Q1-N6-H6
ggactcaaactgaaactagttcaaccttccaagttaagcaccaaaaacattgccaagtacataattctaatggcccccagaatcatcatatgctatgagattcagcaaattaagtatccaaggaatagggtaaaaggctcaatgtgttaaaatatcaaaactgtctctaacatggaacttgattgttggtggtatcacataacataaactcacatgcaaaataggtaacaaataaagagtacactgctgaacaaagaaacctgcaaatggttcaaacattgtatcgaccttttgctgatctttcccttcgagagtcgtcatggaagctatatgtaattttatcattgatgtcaatgatctccttccacttccttccaatacccatctgagcagcctcattcgttgcagtcttggtccacaatgcaagtttgtcctgcctttggcgaacactggcaactacacca

SEQ ID NO: 17878 - DNA, 561 bp, Gossypium hirsutum
  Clone ID: LIB3831-002-Q1-N6-H7
gttgaatgattttccaatctaagtatctgcaggtccaacaaaacttaaataccaagtataaaacctaaaatacacattaaagaaaaagaacctttcaaatattggtaggcaacggtagtttcttacaatcccaactgactgggaacttcaagaatggtctcagccgatttcctaagcctttgcacctcctcatcagtcaaatggatattggtgacgcccaagaccccacctctaccgagctgtgctggcaagctcaagaaaacttcaccaccgtcgataccgtaaaaccccttggcaaggactgagactgggtggattttccgctgatctctaagtagacttctagccaagttagccactgagtagccaattgcccaagaagtgtaccctttgagactaatcacctcatacgcactctcaacaacagctttgtgaatgttctcaagggtctgcttttcgtaggcaatttgctggttctttaggaagcttaacaccggcacttcaccaatactaatgctagaccagagtgctaccgagctgtctccatgctcaccaactatg

SEQ ID NO: 17879 - DNA, 533 bp, Gossypium hirsutum
  Clone ID: LIB3831-002-Q1-N6-H8
ggaataactgattaaattttttctgcataaagaaactacaaaagaaacccaggaaaatgataattgataataactatgatgatgatgatgataattttgatttttgatttttggttcgctccatttgagggaactgaggacctaatcaagatgcccgtacccacctcctcattttggcgtaacctatcgccatagcctcctaccaccccacttgaagccttctcccaaccattttggtacttttatttgtttttgcatttttggttagatcccgtattacatgcatgttgattttagttccagtgttcaggacaataccaatgaagacttggagcttcttcatctgagaagaacttgcaagcttcatctgcactgaagaaatttttttcttccatcttcacaaattgctggggttggaagcacttcatagaagaagatgaagaggagttgaaattgtgtgaaggggctgttgtcggtgacatccaaacatgttggctttgtagaaccccagatgaagatacacccacgtagtt

SEQ ID NO: 17880 - DNA, 608 bp, Gossypium hirsutum
  Clone ID: LIB3831-002-Q1-N6-H9
gcaaaggaacttattattgccataaatttaatataagttggtacatgaattgaataggcgttaagcttcccgcccacaccatcaaagtgttctagtctttaacaataaacacacaaattcataggatttaaataatctaggggaggaaaaaagaagaagataaaactgcaagccaagtggagcacgaccaattacttaaaaggcatgtttgtttaactttaagcagcaacactatggagcacaacagtctcaacagtgaggccaggtccgaacccaaagagcactccccactccagtccttctcctgttgtctgaagtccatcttcccttgatttcttcctcatctcatccaaaatgaataaaacacaagcacttgacatgttaccatactctgaaagaacgtgccttgtggctcgtagcttctctggcttcagtgctaacttggcttctacctggtccaatattgctggaccacctggatgagcaatccaaaaaagggagttccaatcggatatgcccaatggttgaaatgcttctaccaggctcttctctatattcttcgaaataagccccggaacatccttaagaaggtgaaatgtaagcccaac
